United States Patent Application Publication US 2019/0183130 A1 - sequence listing, part 5

SEQ ID NO: 1 - DNA, 19352526 bp, Cryptococcus macerans (residues 7,741,013-9,676,265 of 19,352,526)
gcgcgccgataccgcccatggacgatctgtccgaagagaggactgacagcttcccccttgttctcgcctggtccctttctttctccgctcgatttgccgcccgtgcagccctcgccgtcctagacaccgtcctcacttcccgcccgtcgtcttccgctcggcaagagcccctcccgttcgtctacgtctcggccgaggacgtcttccggccctttgtcgaccggcgctacattgacacgaaacgcgaggcagaggaggcgatcctggctgctgctgctgcggcggcggccgctactggcgaggcgcaggacggagcgggcgaggcgctcgagacgctgagcgtcgaggagcgctcggtcgagcgggctgcggtgacggccggtgtcgagggtaaggcggaggttaagaggccgatcaggcccatcatcgtccggccaggtgcgtctttagttccctggggacatgctctcgtcgccccgggcgtctgctgctgaacgcttgtctgtcctcgagacccccctcgtgcaggcatcatgacctctacgctttaccggcctttgctcgcgcccctcgcgcccctcctcggcctctcgtccgccctcccgccgatcctcccctcgctcgtccgctcgctcgcgccccgcggcgcacacggcgcgggcgggtcctttgcgcgcctgctcgagaacccggcgctcgacgtcgatgaggtcggcgaggccgtgtgtcgggcgatcgagagccgcgcgagggagggcgtcattgggatcgaggcgatcaggcggcttgcgcgcgaggggagcgtcatcaaggagaatgccgtttagatgcgatttttctcagagcaggcgttccggccttgcgcaccagggcgtcggagcgagcgcgaggcgggtttggggtcgtcaaggtggggtcatgtgtttggacagaaggaagcagcggaagagtgagaggtgtgtgggtgtggaggaagaggcgacggccagctgagcaggccaaagacgtcgctcttgtacgagagcccatggccacggacagccgccctcgacaaaaagccaggaccggatcgggctggaggaggggcgctagagtcgacccttttcgataaagaggacgtgccggttgactggtggcgggcgggtgtatgagggtaagtcacacgagttgcgagtctcgtgcacgctgcccggccgcaagcagtagcagcggcagcaggccgtcttggcgaactcggaacgagaactgaagagcaggagcccggggacgcacgcatcttgtcaaacttcatcatggccatcttgggcgcgagccgcggcctctgggcaccgtagaacatgcccgtcagggccgacgagacgagcttgacgaggatcgtcctgagttagggcgaggtcagggtcttgggcgaatgcgctcgtggtttctgactggtgcgtacctcgagcgcttctgcgagcgtgccatggtcgagctgcggagggagaggagaaagatgggtgtatgcaggtcgaggaggaggaggaggaggaggaggaggaggctgctgctgctgccgggctgcgagcctctcatcatgcatcgtggctctccagccatgcatcacctcgctgctgccgcccaaatctgccccgcccgtcgttgccactctgccaacccctctccccggaggtcccactagtttagcgacccaccaccaccaccaccagaatgagggcccatcaggacgccctctggccgacctcggcactcgaggtcagcgacccgctcgcctttgacctcggcacggcgaccaacgccttcctcggccggctcgcgctcggtccaggctcagccggcacacccgtcgtcccgccaacccacctcgcggccctgctcgccgtcgcctcgtccgaggccgaagcgcgctcagctctgcctgtcctcgccgaccttctcgagctttcgcacctgacgacgcttgtcgcagagtgcttcaggccagtcgtcgagctcctcgctgcgagctggctcgatcgcgtccgaggcggccgggacgagtggtcgaggcgggttcaagccctgagcgtccttgccggcgctatcgaagagctctggccgtacgtcattatctttggcatgctttctctctctgtgtcggccggccagtggctgaccctgctttctccccgccccactccaggatcctcgaccacctgctcgcctcatcgccctttactatcctcccgctcgacgccccgctcgcctcgctcgagctggccaccctccatccggcactcttgacaatcctccgtctgctcgagctcgcaccctcgacgagccttccgggccatctcctcccgctcggcgcaaaggacgccctccgccggctgtttgcaggcaaggacggcgagcgtgccgcagactgcgcgacccggctcctggccgtccgggctttctgtctttgggagggcattcctgaaggcccacgccatgagctcgagctcagcacgctcgacggcggcgcgggttggggcgagggtgagctgttttggcgcgaggccgacgagctcgtctacccctcgccgcctttgacggccgacatcaagatggacggcgacgacgaatctgctgcggacgccatcgtcgttcgtgagcgctggagtcgggcgtgggtctggccgctgctcgagcagcgccggcttgaagcactctgcgcggcgctcgaggcgatgagccacccgttcgtctcagctggtgacgacgcgggcaagcagctcgccgaggtcgacctgccgaggtcgattgcgctcgtcgccaacgtctgtgtctttcggccggccagcttggacggccgcgccagcacgccgatgacgaccgacacgcacgtcccgaccccttcgacgacggccgccctgacacgccttgcgctgctcgtcgccgagcgctcgcccgtgctcctgacgtcgacgccctcatcgggcaagacgcacgtccttcttcacctcgccgccctctcgtgccccaacggcggcaagacgcccctgacgctctcgctcgccgacacaagcctcgacccaaagagcctactcggaaactacgtctcggactcaattcacccgggcaattttgtctacacgcccggcgcgctcgcaaaggccgtcagcgagggccgctgggtcctgcttgaggacgtagacaaggcacgcggcgaggtgcttgcgctcgtcggcgagctttgcgaggctgtcggaggcggcggaggagccggcaaagtcggcaaaaggggtcggctcggcgtcccgggcaagcaggacgtcgaggtccaccgcaactttcggctgctcgcgactcgctcggcttcgactgcgcacgatgctgcggtcgagggcaggccgcgctttgctccgccgacgttcctcggccatgccaagtggaccgaagtccacctcgtcccgccaaccgagggcgaggtccgcgagattctcgagcgccgcttcccggtcctcgaccaggaggctgacggccaggtcgtcccgacgctgattggcgcgtgggaggctgttcgggcgggtcgcaaggccgcctcggccaccggcggcggcagccagtcggttgaaggccgcgagattggtctgcgcgatctcatcaagtttgtcggccgcgtcgaagtactcctccaggggtgagtcgcgtcttgcccgttttcgagcaggcgagctccttcggctgacgtcttcttgctcacggtccgtcccaggcccagcacgtcgcagacgcgcttcaaccacatcggccaagcggtcaaccctctccttcaggagtccatcttcctctcggccctcgacgtctttttcgcctgcctcccgaacccgtcggccggtctcgcgtgccgtgtcggcgaggtgcttggtctcaacgaagagcgtgcgagctggtgcgttgccaagcgccggccggagctcgtcagctggggcaacgaaggcggcgcggcggttaaaggctggaaagtcggccgggggaggctcgaggcaaaggtctcgaaccaaggtcagtcgctttatctcgccatgggcagcctgtgttcctcgcactgacccgcctcgtgcctctacgcccgcagccttccattcgcccgctgccggccggccgtatgccctaacgcggccgtcgctcctgctgctcgagcagctgacgatcgctatctcaaaccgcgagccgctcctgctcgtcggcgagaccggtacaggcaagacgacgtcggtgacgcacctcgccgcgctccttcgccggccgctcgtttcgctcaacttgtcgactcagaccgagtcgtcggacctgctcggcggcttcaagccgctcgacccaaagctgcccgcagccgagctcatgggctcgtggctctctctttttgagcggaccttttcgcgcaagaagaagacgaaccgggcgttcgaggacgtcctccgcaaggtcgtgggtggggccaagtgggggcgggccgtcgaaatgtggcgcaagagccggtcgctcgcttgggagcggcttggcaagcaggtcgaggatgttgaggacgcggtcgaggatgactcgtcagtctaccctgtctactctttccgctgaaactcgtcggctgaccccttcctttctctttgtccgttcgcagccgtgaactagcgaccgacggccagccgagcagcccgcgcaagcggcggaagacgcagacgaccgaagagcaagaggaggccgagcacctcctgcgcgagtggcaagcctttggccaggccgtcgacgagtttgacgtccagcacgtcaagagcggcggccgcttcatgttttcctacgtcgagggcccgctcgtcaaggcgctccgggccggcgactgggtcctgctcgacgaggtcaacctggcctcgcccgagacgctcgagtcgctcgcgagcttgctcgagagtgcgacgagctcgcttaccctgaccgagcggggcgacctcgagccggtcccgcggcatgccgacttccggctgtttgcctgcatgaacccagcgaccgatgtcggcaagaaggatctgcctcccgggctccgcgcacgcttcaccgagctctacgtgccctcacccgaccaggaccgggacgcccttcgggcgatcgtcgagcagtacattggcgacgctgccgtcgccgaccgggcagccgtcgacgacatggccgagctctacctcgcgacaaagggtctcgcgagctcgcgccagcttgccgatggctccaacctcccgccgcactactcgatccggacgctcgcccgggccctgacgttcgcggcccagattgcgcccaactatggcctccggcgggcgctttgggagggcttcctcatgtcgtttacgatgctgctcgaccagaagagcaacgccatcgtccgcgccctcaccgagcaaacgatccttggcgcgcgcaacccaaaggccatcctctcgcaagtgccgtcgatgccggcgggcgcgaccgaggacgacgtcctccgtttcggccacttttggcttcggcggggaccgctcccagccgacccgggcgccgattatgtcctgacgccgtcggtccaggccaagctcgtcgacctcgcgcgcgtcatttcgacgaaccgcttcccggtcctgatccaggggccgacctcgtccggcaagacgtcggccgtcgagtaccttgcccgccgaaccggccaccgctttgtccggatcaacaaccacgagcacaccgacattcaagagtacctcgggacgtacgtctcggacatcgagacgggcaagcttgtcttccaggagggcgtccttgtccgggccgtccggcggggcgactggatcgtcctggacgagctcaatcttgcgccgaccgacgttctcgaggcgctcaaccggttacttgacgacaaccgtgagctcgtcatccccgagacgggagaggtcgtccggccgcacccgcactttatgctctttgcgacgcagaacccgcctgggctctacggcggccgaaaagtgctttcgcgcgcgttccggaaccgctttctcgaggtccactttgacgacgtcccgcaagccgagcttgagcagatcctctacgagcgctgccggatcgcgccctcgtacgcaaagctcatcgtcgccgtcttccaggagctccagcaccggcgccagtcggctcgcgtcttcgagaccaaagcgtcgtttgcgacgcttcgcgacctcttccgctggggtcggcgcgacgccggcagcaaagaggagcttgcagagcacggctacatgctcctcgccgagcgcgcccgccggcccgaggacaaagttgtcgtcaaggaggtcctcgaacagatcctcaaggtccggatcgacgagcacaagctttacgacctgctcagtgcgtgctcatgacctactctacgatcgagtaggctgctgactcgttgctcctttcgtcttgcaggcctcaccgaggaacaggtcgttgctcggctcggcgtgccgctgccgctacctgcggccgactcgcacatcgtctggacgactggcatgcagcggctttacacgctcgtcgccctctcgctcaagcacgacgagccggtcctcatggtcggcgagacgggctgcggcaagacgtcggtctgtcagctgattgccgccgccacgcgccggcacctctacgaggtcaactgccaccagaacatggagacggccgatctgctcggcggccagaagcccgtccggaaccgcgcggccgttcagggcgcccttctcgccgacttcacggcccttctcgaccggctcgagctcgccctcggatcggagcgccctccggttgataccatcgagcgcgcgctcgaccttgccgagtcgctcatccggcctggcaatgtgctcccggccgacacggtcgccgccctccgccagatctctggccagctcaatcggtcgaccgcgctgtttgagtggcacgacggcccgctgatccaggccatggccggcggcgagctcatcctgctcgacgaggtctcgctcgccgacgactctgtcctcgagcggctcaactcggtcctcgagccggcccggacgctcgtcgtcgtcgagaagggcggcaaggacgttagccagatgacgatcgtcggcgcttcaggatttgaggtcctcgcgaccatgaaccccggcggcgactatggcaagaaggagctctcgcccgcgctccggaaccgcttcaccgagatctgggtgccctcgctggacaaccatgccgacctgctcaagattgtccagtcgtcgtgggcggctgaggcactcgagccctacggcgagcggctgctggccttcctccgctggtttgcggccgagctcggcgagccttcgaccccggtcgtcggcgtccgcgacatcctcgtgcgtcacgtctcgacctcagtagctgcttcgtcccctcgcgctcaagtgcgctgacctcttctctccttctgcccttgctaggcctgggttaagttctcgaacgtcgccgtcaaccagctcggtctctcggcgtcagacgcctttgtgagtgtcgcccttgactatcgaccgcagcgcttgatctcacagctgatctgttgcgtcgcccccctgcagtacgaggcagctcacctgacgctcatcgacggcctcggcacgttgcctcaggtctcgagcctctcggcggctgctcttcgcgacctcaaggcggcctgtgtcgctaagctgctcgagttcctcggccgcgaccgcgcctccgcctccgcggccgcctcggcacccgccgtcgatgacgcggacgagtgctttgccattggctcgttcggcctcgcgaagggccccctcgaatcggcaagctcgaacttcagtctccgagcaccgacgacgctcgacaacgccatgcgcgttctccgcggctgccaactgactaagccgatcctgcttgagggtagccctggtgtcggcaagacgagtctcgtcacagcccttgccgtcgcgacccgcaaccacctctgccgaatcaacctctcggaccagacggacctggccgacctctttgggtcggatctgcccgtcgagaacggccggccgggcgagtttgcctggaaggatgctgctttcctgacggcccttcagtccggccagtgggtcctgcttgacgagatgaacctcgcctcgcaggctgtgctcgagggcctgaacgccgtcctcgaccaccgcgggaccgtctatatcccagagctcggccggtccttcagcaggcacccggatttccggatctttgccgcacagaaccctgttggccagggcggcggccgcaagggcctgcccaagtcgttcctcaaccgcttcacgcgcgtccatgtgcaggagctcacggccgacgacctccggctcatctgcggccagctctacccagtcttcccggccgacctgctcgagcagatgatcgccttcaacagccggctccaccgggcgactatggtcgagcggacgattggccgagccggcagcccgtgggagtttaacctgcgcgacgtccttcgctggctcgacctcttgcatgcccggtctgggctcgagcagcggccgggccagccaattgagcacctccggacgatctaccttcagcgctttcgcacgcccgaggaccgggcagccgtcctcaagctgttcaacgagcactttgacgacgactcgctcgagctcgaccgcaagccttggctcgcggcgagtccgcagacagctcaagtcggccatgcgctgatcgaccggctgccgaccgtctccgccgccgcagacaaactcgccctcctccaggcccatctctcgccgatggaggcccttgcccgctgcgtcgatgccggctggctcgccattgtgtctggctcgccggcgagtggcaagagcagcctgctccagtcgtttgctcaaatggccggccggcggctacgctcgttcgccatgaactcgggcgttgacacgatggagcttctcggcagcttcgagcaggccgacccgagccggcgtgctcagcgcatcgtcgagcgcctgcttcccctcgcccgccaggcgacctcgcgcgtcgttgccgctgagaccgagtggctcgctcttagtgccgagctggaagccgtccaggccctatcattcgactcgccggccgacttccacgcccgcgtgacggcgatcctcgagaagctacaaccttatctcgacgaggccgagcagcttgagtaccgctggctgctcaacgctcttgcccagctttcggcctccggcgagacgaccggccggttcgagtgggtcgacggcgagctcgtccaggcgctgacggccggcgactggcttgtcatcgacaacgccaatctttgtagcgcctcggtcctcgaccgcatcaactccctctgcgagacgcatggcacgctcgttctcagcgagcgcggcagcgtcgacggcgtcgctcaggtgctcaccccgcacccccgcttccgcctgtttatgacgctcgatcctcggcacggcgagctctcgcgcgcgatgcgcaaccgcggagttgagattgcgctcgacgacctcgccgctccggccgacctccagcgcgtgtcgccaattgcccggcgtcgtgtcgccggcgtccgttcttctaagaccgacacctctgcccgaccatcgatcgactcatggacgacgcttgtcgcttccgactctctgctcgcttgcagcatccctcacgacgcagccggcgcgctgccctcgacaatccccccgacttcgggtgcgatcctgcattcgatcgcggccagctctcaggcttcgcaggcgatcgtccagcagctgctttcaaccggtggcgccacttcggccgctttgacttctatgctgatggccgacctccgggcctcgaccgtcctttcgacaatgacgacccacctcgaaagcgctacttcggccgcgaccggtctcccggttgtcttcctccagactcaggtgcgtcccgcttgagtttcccctctgcttctgcttcggcaccctcccttctgctgctggtgcacgttgaagcgtcgcctggtcttcttcttcctcccccccgcgtcaggcagaggacccgaggctgaatctcttgtgctattccatgtcgctttttgcttcctacccgcatcgtccgcctcgtgtacttcagccactcgactcaatgctcaacgcccacctcttctccgagggcagcgcagcccaggctgccgcgagccagatcgtcgagctctttgtccggactcggctcggcgcgcttcacctcgctgccgcgctcaagccggccggcgtcaagcacgccgacgacttgtcggctcttgagcggtcatacgtcgttgcggccggccgcacgctcgaaaagtcgctcgacgcagtcgccctcggcgtttaccccgtcctcaaggccttctacgacgacttggccgcactcatgcagtccgaggtactcctcgacggcgctgttgagctgccggtgcgtctccttgccctgtctgcgccaaccgttgcccctttgctgaccgccgcccattctgcgtcttgtcgtcagccgttcctcgcggtcttatcgcagctggccgacatcctccagcagctcgagaccgtcacctcgcacgccgagctcgattactcgtcgatccaggtcattacgctctggctggcccggctcatcgacggctctaccgcctgcatccgtgggctctcggcctttggcccggcccttacccagctccaaagctcgattgcatacgacgctggccacggccagcaggagatctggctggcccacctgccctcgcgctcgcagcagcttttccaggacacggttcggcggctgtctgacctcctccagggcgttcccgtcacccacgccctctaccagggcctccgctcgagcgctctcagcctcgcggcgaccggtgcgctcgagcagcttgccgctgacggctcggacggcatctcggctttgagccgcgagatcgagcaggtgggcctgcctctccatgtatgaccgcttgcaaagattgcttcgctgatcctccacttgattacccgtctgcgccggcagtccctcgtcaaggctcaagacctcgagaccgctgctgctgcggccaaccggatgcacaagaacttgctcgtcgtctctggcctcgacgtcgtcgctgatgcgctcgccgacccggagcagtcggtgcgtcgtgcctgctcatgcacactcgtgggacgctacagcagctgaccaactctatggcctttttgcagcacgacaagcgcttgcgcgcgatcctcgccataagcgaaagcacggcgcccttcccgctgtccgagatgatcgtcttccagcaggcgctctggagtgccggcatcggtgcgtcgtcttgcccaacaaccttgcgcccgccaagcgagagagctgactgtctcttttctcccaccgcagccaacgagtctcaacacggcgctcagaagctcgccgacgtctggatcacactcacctggctcgacacgccggaagacgacgaagtgagcaccttctcttctcatgaaccgacgagaggcgactgacacgcactctgccgtcagatcctcgctggttgcgccgacatcttccggccggtcgtcctttcggccgtcttcgatgagagcaacccacagcggctcggcatcaaagacctgccggtccaggaccagtcgctcaaggagatggcgaccgtgctcgaggtccggtcgacgacaatgacgccctctcgccacgccgccatgtcacagcttctgttgtcgaccctctcatcggtgagctgctctgagaccagctctttttccagcgagtcgggcgctgaccggtgtttcgccttacctcaggtcctgctggcgttctcggctagctggccggcggacgtcctgcagcggctaagctccctctcggaagcgaccgccgcctctgacctggccgccttcatccgtgacctcgagtcggcctcgcacgcagccctcaagacgagcctccagacccatctgatcggcccacttaccaccctgctctcgacgcgcgacgacccgctcgtcgcactcggccggtgctggctcggcctgtctatggtcatcctccagctctacatcccctcgatcccgattgacccctcggctgcacagcgggccgagctccagctcctcgagatcgaggaggcgcggctcagcgatgagcttgacgcccacctctcggccgaggcggctatcactggcaacgctgacaacctcaagtcggccgcgatccggccgcggctcaacgagatccgcaaggcgattgcccagctcggcgccatggtcgtcgagcggacgtccgacgttggcctcctgaacgccatgttccacgaggtccacgagtttttcaacgaggttctcgcgccggcccggatgcagaacctcgtcgaggcgctcgccaacgcgccagacgagcaagcgcttatgcgcgagcgctcggcccaggagaacattgtcggcttctgccgccggctcgaccagacgtaccgtttctttgccgacctgcaccggccgatcgtccttgccctcggccagctgaggaccggcctccggctcatctgccgcgatgccgagctcaagcgggcccgccaggctcagcagctcgaggccgacctcgtgcccattctgacgaccttcccgaccgcgctcggcgtcgaccggctccacgcggccgatctccccgtccggttcaaatcgcactcgccggccgttccgacggcgagcctgctcctgctcggcctctccgcctcggtctacgactccggcatcggcgtcgcgttcgacatcggtcgggtacaagccgtctcgacgctctttgaccagttcacccacctctggttgatggactgcgagcgccaagcgcaggccgagcaagaggccgagagcctctaccgccagcgcaaggtcgaggaggacgttctgaccgacatcgagctcgaggagaaggagttcaaggagctcttcccccagtttggtgacgtcctcgacgacgactatgaccagggcgaggacccgtcggcccagtccaaggacaaggccctcaaggctgctttcatccagcccggccaggccgctgtcgcgctccggcttcacagtgcgtgatcgccaagcgacccccgcagtgctccctcgtcctgactctgacttcttctctcccacagccgcgctcttcaacccgaaggacatgaccgccggccagcacttttacccggcggcgcgcgagtcgatcgtccgacaagtactcgagcgttgctacgatgccctgtccgactcggtcgacgactcgctcgcgttccagatcggcgtcgtcctcgacaccgtcacccgtggcggttgccagccgacgttcgccgacggccggccctacgactactacaccgacgcgaacccgagtgagatgcgcaaagcagtcaagctgctgaaccggctcgttgcccggcttgaggacattgcgcgcgagtggcccgaacagatggtcctccggcatctgctcgaccgctgcgcggcgatgcttgccctcaaggctgacagcccgatcgtccgggtcattgcagcctttgagggtctcctccttcacacggccgactgggaggcctacgcaaaccgcgacaacacgctcgctggcttccagaccgacatcggcaacctcatcgtcgactggcgccggctcgagctctcgtgctgggcccagctgctcgagacgcaggcgctcaacttcgccaacgagacgagctcttggtggttcaagatgtacgaggtgctcctccacggcggccgggctgcggcccaagaagaggccgaggtgctcgagtcacgcgcgaccgaggcccatgccaacagcctcgtcaacctgattgaccgcttcatgacgacgagtccgcttggccagttcacgccccggctcgacatgctccggaccttctcgcgccacctcaacgcgctagcagggacgccgagcgcctttgccggcatggaccgcatgacgcgcgttctcgagagcttgacggcgcgctacacgctctcggagccgacggtcgcgacctcgctcaagacgcagcgcgacaaggtcgagcgcaacgtcaaggactttatcaagctcgccagctggaaggacgttaatgtccatgcgctcaaagcgagcgcccaacatacgcatcgccagcttcaccgctgcattcgcaagttccgcgaggttcttcgcaagccgtgcaacgtcctgctcgccccgcccgggtcgcagcgtaagccgaccgacggcctcgtccggccggccctcaccgccagtggacacgacggcagcatcctcaaggcggccgagtctgccggtgacgccggaccggccggcaacctgcctcggatgtttgagaagtttcaggcgctcctcgcgtcgtcggtccggccggccttctcctttgagcagcacgaggtcatcaacgacgccgcggtcgagattgtgacgacggcaaagtcgctcgctgacgagacgccctcggtctacaacgacgagacggcaaaggccgttaagaacatgctgaatcggaagcgcgttgcctggggcacgctcctcaaggagctccgcaagatgggcttctcaaaccgcgtcaaggctcccgtcctcgccctccagcagtccttgattgcgatccactccctcccggccctccggcttgacgacgcgaccggcgcagccccgctgacggccgaggttggccggatcgaagagtaccactaccggatgctcgtctccatgcccgagctccgcgattcgctccggtcgcaccacaccgacatgacgacgcccgacctgacaaaggccgtcggttttgtcgagagcgtcctcgccgtcgccctcaccaaccgggccaggtccgtacatgcttgctctcggctgctgacagaaactctgacgactttgctcccgctctttccagcctcgcggagaaccttggcctctacacccgcctagatcagtacgtcagtcgtctcgatcagctcacgttggcagctggctccggcgtctcgttcggcgccgtcggcgccggacccgaagctgtcgtccacgccgccgaccgtttcttgagtcagatctcggacgcacttcgggaactcctcgtcagccggcgcaagtacgagcaggtcaccggcgcctcggtcgcctcaaccgactcgcgctcacacatcgagtcgttcctgtcgacggccagcaacctccgagcggccgtcgcccggatcgtcgccagcatcaagggcgttaggcttcaggtcctgctgtcgtgtgcgttttttacccttctggctgagggtttgacgttgggctgacttcgcgttttcactgcaacagccgagattgccacgctccagcagtgcgaggctctcgccgccgagcttgaagacactcttcggcagctctcggccaaggagccctccctccggcatctctaccaaggcctgatcaatctcgtcgccgcgcgcccagcgctcagccttgactcgacaccgacgcccgcctcgaccgctgccgtcgacgagacgatgacgaacacagccgacgctctcgtacgctcgttcctcaacatcgccaaagctatgcacgattcgcttgcgtccgcaccccctatcgacaccgacgtgccgaccaaggcctcgggcacgctccagcagcgcacccggacgctccgcctccctgcggtcgtttcacacctcgagcaggtcgtcatcgccgccacctcgcctgcggtaactgaggcggcgctccagcgtatcgcgccgttcgcggccgagtacgcccttctcgtccaggaccatctgttctcgctcgcgtcgtggaccggcgccgtcttcaagctcgcccacatcctcggcaatctcacgctcagtctctctcgcaagggcttctgctcgccgcaggagggcgaccagcaggatggtgccgagggcgacgagggccagacctcggacggcaccggcatgggcgccggcacgggtgagggcaacgtcagcgagcagattgaggacgagagccaggtcgaaggcctccaggacgaacagccagagcccaaggacaaggaccagaagaaggaggagggcggcgcgctcgagatgagcgaggactttgccggcgacctcgaagacgtctcggccgacggttccgacggcgaggaagaggacgacgacgacaaggacgacgaggacgccccgccggacgagcaggtcggcgacgtcgacccgctcgacgagaatgccgtcgacgaaaagttctggggcgacgagaagggcgatgaggacgactcgaagcaggacgagaagatggaccaggatcactcgaaggagcagggcaaggtgcgtcgagacttcttttgccgcctgatctgcaccctcgttgctgaccacctgctgcttttctcttcaggagtctgacctcgttgctaaggagaacgagcagcccaaaaagcagcagggtaaggaggagcagcctgagccgcaggctcaacctgaggatgacgagcccaacgacgacgaggacgcgccaatccaggatcaggaggcagaggatgacgaggaggccgaggccgacgagcagcgtgggcccggcgagaagatgcccgacaacgtgcccgaggccgacacgctcgacttgccggacgagatcgacctcgacggcggcgaggacgaccaggaggacgacggcggacccgacgacgccccgatggacgacgacggcccgcccgacctcgaccagccgccggctgacgataggccggacgagtccacgaagcaggaccagccccaaacggacgaccccgccggtgagggcgagggccaggaggacctcccctcggaggctcagaccaaagaggagcagccagaggaggacgagatggccgacccgagtgcccaggcccaggccgaagccggagaggatgatgctgtccccgaggacgaggaggatgagcccgagtcgcaggtcgcccagcccaagctagagagcggcaatgaggcgtccgagaaccagcaggacacccagatggacgacgccggcctcgagactggccaggaggaggcttcgatggaccagcaggacggcacaaaggatgaccgcggcaagcaggccgacgcgccgtcggccgagcacgaggacgacgccggcgagaccgcccaggacgaaaagtggactcaccttggcctttcaagtctgattcgcttcatactgaccttcttccgctcaaccttccgtttctcctcagtgcctcggcgccgccgccgacatcgtccgagtccaagggcggcgagggcgagacggtcccaatggacgagagcgccaacaatgaggccgagtcgaagccggtcgatgacccgaacccgatgcggaacctcggcgacgccctaaaggagatccgcaagcggttcgagcagatccagacgccggccgaggacgaggacccgcaacccgaggccgatcctgcgatggagcagggcgaggtcgagtacgcccaggaggacgacgacaaagacatgcaggcgctcggcgccgcacccgaggaccaggtccaggcgctgtcggatctcaagatcgccgatgaggaggtcgagggcgaagagattgcccacatggacgtcgacgaggccgaccaggccgagccggcggcccagcttccgctcatcgtctcgccgccgcaggagctcgacgtcgccgaggacaaggcgctcacccagtctgaggtccgccagcgcggccagcagaaggagcccgagcagatcgaccggccggccgagattgaggaactcgacgtcgcgccgctgaccgaggacgaggcccgggcgcttgaccgcgaggtcgagatgaaaaacactgagtggctcatgtcggacaggtcgtcggcctcggccgaggccatgtggcggctgtacacgtcggtcacgcacgacttgtcgcacacgctgtgcgagcagctccggctcatcctcgagccgacgctcgcaacccggctcaagggcgactaccggaccggcaagcggctcaacatgaagaagatcatcccttacatcgcctccgagttcacaaaggacaagatctggctccgccggacgcggccaagcacgcgcgagtaccaggtgctgctggcgctcgacgactcgcgctcgatggccgagtcgcactcggtccacctcgcctactcgacgctcgccctcatctcgcaggcgatgaccaagctcgaggtcggcgacattggtatcgccaagtttggcgaggcctttgagctcctgcacgactttgagtcgggcaccttttccgacgccgagggcgccaaggtcatgtcgcagttccgattcgaccagaaggcgaccaacgtcctctcgctcgtcgagcgctcgctcgaggtcctggccgaggcccgtcaacggcgcgcggcaacgtcgtcgacctcggccgacatctggcaactcgagctcatcatctcggacggcatctgccaggaccacgagaagctccggacgctcctccgcaaggcagccgagcagcgcgtcatgatcgtcttcctcatcgtcgactcgcttcaccggaccgacacccagccggccggctttgcgcctaaagtcgagcccgaggcgaggagcaaaaactcgatcctcaacatgaagacggccaagtacgaggtcggccccagcggccagatggagctcacaatggagacctacctcgacacgttcccgttcgagtactacgttgtcctccgcgacgtcgaggccctgcccgaggttctcagcgacacgctccgccagtggatggagaggtgcgtcgctcccttcttcgtctctcctatccgacggctggctgataacttctgcgctctcgtctgcagagtctctgaggagtaaacccgtcctgtctgtctgtcaaagatctcttttttgcttcctgtctctttctcacgattgtgcgttggccctttctgtcgtctcactcacagtcgacgaccgactgaccgccgagttgcgcccctctttctaccctctgcagtgcacgtccctcgcatgttccgtaaaccgccttagatgctttcttgtccctttgcactttgctttttcccctttatatagcagccatgtcccgctagacgatttcatcctcaattatcattctcgacggcctcgagcgaaagcgtcaagggcagcccctgtcgtttcaagcgcagcggtcactggaaggaggtctatccctgcgatttactgcttccaaggccgaggcgcttgctcgcgtcgctctcctaggttcaacctggaactcctacttagcccagaatgtgtcaggtcccgtatgcagagaagggtcaggggttcgagcgaccgagcgagcagccccttttggcggcgctgcgggccaaacttggcgacgacgatccgccttcctccagctgacggccacctcgccatctcccctgaccgacgctttcctcgcctttccgagcttgtctctcgcttgagaagggccagccagtcgctatcatcagctctcaccagtgaaagctcgtctgccgtccttctgccagctccatcgctcgagatggccgcccagcacggcggtccgaccaagggcccaaccgcccactttgccttcagcacctcgatcgaccctcagctttggagaaggacgctctccgccgtccagtagctaccagcagctcaagacacgcacggctacctccgacggaagtccctgctcgaggaaggcttgacggccgagcctggccgaggagttcgcgcgagcgtcctccagcggctcgaggcgaaggaagtggcactcgaccgcgaggttgcgtgcgtccctcggcttcgaacaggcggagaaacatcgttgctgacctctcatctccttcgacgccagccagcgcctgcgactcggctcttgcggcgctctcgaccctcctgagctttgggcgggggcacacgcacggctcgcgcccgtcttcgtcgacaacgacgaccaacttcgagtcgggtcctttcatcgacgccaactcgccgacgccaactcgccaaaaatgaaatgacatggcccgcctaaaggaccaacagctcaccttcctgtccgactccgttcccgacgtcatcacttgacgcctccgggccggccgatgcggcatccacttgaacgcccttccggagcttccttatcaagcccttcgaccggcgcaaggcagagcacatcagagccgaactcgtcagccagctgccgcttgctcctggtcgtcgggtcgccttccggctccagcagaagaaggccgacaggccgccgaggggggccgttaaacgggtgcagaggacggagcctgctgtaggagacgagtggatcctcgcgaccgtccgtcggcagattggcaacgacggacagcgctgtatgccgcacgagtcgtcggccgcgagacggaacgtcccttttacgctgatgtcaacggggtggcgcaaagcggcgggccgtttcgcgaaaggtgcccgagatggagcagcgctaaatcgtccggttcgaggacgacgaggaccgcatccagaccgttgagatgggcgacattgccgagtgtccgggcggccaggactgtgcgttctcctgcgtgctaaggttcttactcctagaggacgacagactggatctccttgcccgtctgccgcagatgtaaagacgtgagagtctgttgctcgcacgccgcaacgggcccacgatgcgttccgattcaccgccgaagccaacacttcctcaagccttcccatccctcttaccgccgtgccctcttgatgtttccgtcgcacattctgttgctcatctggtcttcccatcctcgctgccggtgaccctgctgcagtggcgaagcgcaatcgcgagtgcgctagcagtgcgcgcctcgtccgaccgaaccttgctcttgatgatggtacgatcatgtcagaagagcggcaggcaggacagaaagtgcagggtgagatagcaccgagtgaagatggactggaagggggtagcaagggcgagagggacgggggatatgaagaggacgcgggatcggatccttccgaatgtcgaagaggagaggggcgagagataagacaggatgacagatcggattaggaggcctgcctgatgggccccttagcaaaggaagctgtgggtgagccccgaccctggctttacagccgggatcggggacaagggcagtgtgcctggagggacgggccgcagcggatggcgccgcgactctgcctgtaggtagcggagagcgaccaatgagaaggcgcagccagaaggagaaaaaaccaagacgctacagctccgaccggaagcgcttgccgccgccctcgtcggcgtcgtcgtcggcatcgccggcgccaggcgtctcgatgccctcgccgagcgagcgcttggtaccagtgatgctctcggccgagaagctcccgccagggacaaactcggcaaacagcgtctcgctcaggccgaacggcgccgtcgcgcttgagtcgccgtcgccgccgacttcgccgccaggcgcgccgtccgtcgtcggatgggggtacgcctcggcctcattgccgccacggaggctcgggtcgatcaagctggcgctgatgcccgacgacgggccgtttgacgacggcgggccagacggcgccacattgccgacattgctgctgccgccgctgcccggcgtcggctcccagccttgcgggacgtcaatgtcgatcccgctgccgacgaggccgttctcgcgcgccgtacctttgtcgccgttgtcggcatccgggaagcggttgagcgccgtcggcgagacggccgccccagactcgatcggatcgctcggcagaggcgagacgccgtaggacggccggaagggtgtcgacgcggcagcggttgacggctctgatgtcgacgaggcaggcgtaaaagtctcgcttgccacgcgttgctctgcgaagagttcctgcaggtcagcacacgcccagcaagagctgcggcatcacgccactcaccattttccatctggacgaggtagttgacaacatcgccgacgagcgcctcggtgctcgtactcgaccgctgcagcgcaacgaggtcaccaatgatcttctggtactttgagtgcagcgtctggacgtgctgaaacatggcggcctggccggcctggagctcgcggacctgctcctggaggacgttcattgctccggccgaggttgcgtcgctcgcgcttgcaggcgggccgccgtacggccctggcggcgcttgcggatggaccgaggtgtgttgcggcgggtagggcgacggcccgtagggcgagggctggccgggagagtgaggcggaggcggaccgccgcctgggaagtggccggggggtgctgaagacggcggggccgagagccgactgccgttgtgaggctgatgaggatgctgctgctgctgctgctgctgctgctgcggatggtgcggctggagatggagcggcggcgggccgagcccggccgaaggaccgagcgggccacctgcgctccctggcgcgccttggtcgagcgggacaaatccgccgttgccgttcgagacgagcgggaccgacgtcgtcagcggcgcgctcgtcgacgccaactccttcgccaatgccccgcccgaggccgcgccgctgcccgccaccccgctagcgccgccaccgcccgccttcttcgggacgggaatcttgcgcttgatgaggtcgagctcggacccgctgcgcgagttgaactgcgggtgcttgaactcccaggtcgtctcgacgtggccgccctcctcggccttgacctgccaggcgatgctactcgtcagcaggaggccccagcaagagacacctttgtgcggagccgcaccttgtgaaagtcgtacttgttgagttgtctaacaaaggacgcaaaattggagtggcgaaacgtctgaggcaggatccgggtcgtgaactcgttcatgtccttaacgatgaacgagtcttgggcggccgaccaagcgacgacgtcggcgtactcttcatcgccgagcatcctgcgagagggattagcgagggtcagggtcgacctaaaacgcgaagtacggccgccgcgacgcctctacggaggatggtcgacgagagagtcaatcaggctgcgcgagcacacgcacttgaagagcttcttgacaaagtcgctcgggccattaccgcccgcctggccgccggctttcctcccgccggacgcaggcgcgccgccgccgccagtcgtcgactcgccctcgtcggcgtcgtcgtcgtcactcccctgcgcactccccttgccggccttcccgccgcccgacgcaagcttcgctgccgctgccgccgcgcgcttctcggctgctgctgtccgtgctggccgaggagccccgccaccgccgccacctgttgtcgtcgtcgagggtggtgggagccgagaggatgcggccgagtcgggcctcgcgggcgggccaccggtcgacgacggcggggtgatgccgacgttgggcttcaggtcgaacccgtaaccctgggcgccgagctgctgctgctgctgctgctgctgttgggggtgatggagcgggtgatgcgggtgcgggtggtgttggcccggtggcggaccgtagccgccctgaccgccgccagcgccgtacggatagtgctgttgctgctgctgttgctgagggtgatagcctccctgcccgccttgcgggccctgccagccgccgagcgcaggcgactggagatgctgctgctggtgctggtcgtgatacggcgacgggctgtgcgagagtgacccttgctgctgctgctggtgatgcgcatgctgctgctgctggccgccacctcgcgtctgaacgttacgcacgagctgggccgtcggctggcttccgagccccggcgcgccagcgacgggcgccctcggcggcggctgcgaggtgaagccctgaaggccgggcggagcaccgccgccgccgcctgatgtcggctgaccgtggtggttatacgggtcggacggatgggcgagcggaggcggctgcggctgttgcgacgggtagtagtgctgctgctgctgctgagggtgatgcgggtgtgcctgttgcggatgctggccgccccagccacccggctgctgctgctgcggctgctgatagtgtgtcgtcggcgggccgtaagggctcggaagcgctggcggcccgccggccgacgaggacgacgacgacgcggccgacggctgctgctgctgctggaggccggctccagacgggttggccggcggcggcggcggcggagggtagggcgacgagcggccgccggcttgggcctgctgctggccggcgaggtgggccggcggcggctggatcgacgggtgcggaccgccgtcgttcatgcctcctgacgggaaggaaagggcgatggaaggagaaggaggtcagggtcgaggttggacgctaaagggtcgaggagaaacgcgggccgacgagacgcgcgcgcgcaagagagcgagagaccgcggagctcggggggaggaggaggcaatcgcacgccccgtgccgtcgcaaactggacatgacctcttggctcttctgaaaggccggcagcagactgggctgggaggaaagacggagccttccatgctcactgtgcgcatctgtcgcgacagctgtccgagcgacgagacgatcaaccttaccggcagaggcgcgcgactgaaagatgtcgtcgtcggtccggccacccgcgagcggtggcggtacaagccaactgacccgattctgccgaagcacagtcaccggtgatacaagcttggatccaacccaccatctcgtcgtcgacggcttgcttaaatccgcgtgctgtcgacaggcctagcgaggcgtagcttggctgtgctcccccgtctggactgtatcggggtttcgcttgatttcgcttccccgcgccgccgaccgctcgcccgcccgacagcagctcgaccttgtcctggtcagccacgtcctccctctcctagcagcccttcgtcccaatgtctcttcgcgctgccggccgtctggctgtcctccggccgaggagttcagcagcatcagccgttgcgatccgtggtctccgcgtcggcctcggctacgtccctcagtcggtgcgtcccgcgtcgacctctcgctcgccgcttgcgccggcccttccgagctcgcgagctgacgacctgcgctctccgccgctctcttcctgctaccttgtcttgtcttgcatgcgaccgctcgcaggcctcgactctctcgatcgagcccatcacgccccgggctaagccgccgcccttctttttcaccggcaagcccaacctctacgcactctacgaccgtctccagtcggcgcttctcgcgaccgagcgccggctcgcggctgagggcctctggccggcctttgcaccgatgcctgagatgggcaagattggctggaagtggaagaaccaggaggagatgctcgagattgccaacgtcagcgtgtgcgtcctgactccctcttggcttgccgagttctcgatcctcctgggagagctctcactgatgctcgcttgcctcatacttgccagcatgaccaagaccgagtacgacaagcttctccgaatgctcgtccggctgacgcggctccggcactactcaaacgtcgtcgccgacacgcgctcggtctcggcgctcacgggcctgctcgcgccgttcgagaaggtcgcggccggctcgggctcgaagctcgcgcgctcgctcgagattggcggccaagacggcgacgacggccgcggcggggccggcgcggtcggcaagggccccccagccaacaagacgctcgacgatcacggccggtcatacacgacgggcacgcgtaaggaggccaaggcgatggcctacctgattccggtcgccggcgttgcgcgcgcgatgaacgctgtgaacgaggcgcgcgaacaccgggcatttgtcgcggccgagcgcgcaaaggacgaggcgcagttcgagcagcgccggcaggcacaggcaagcggagccgagcagatgcagccgacctggcgcgaggccgacgccaagcgcgggcgcgaaattgcagacgagaacaagcagcgcaagaagctcgggctcgagctcctgccggttccggccgggttcgaggtctcgccgttgggccagctcttgcggccagcagctgctcagcgaagtcccacgcccgcgaactcatcggccgcatcgacctctgcgtcgtcgccgtcctcatcaacagcaggggagaagggcggtgagtcgtcgtcacggctgcacgtagctggtcagcctgacggccgcgagatcatcccactcgccttctctggcccgctcgcgcccgagccctcggcgagcaactcgaacgcgccctcgtcctcgaccgaacgggacggcacgctccacttccccaatgggaccgtcccgtctccgaacgccgaccctttgctcggctcgatcctcatcaacaacgtcccgctccaccgcttcttcgtctcgccaaaggatcgcgaggccgtcctccggccgttcattgtcagccggacgaccggcgccttcaacgtctttgcgaccgtcaaaaatggcgggacgaccggccaggccgaggcgctcgcgctcgcgatcggccgcggcattgccgtccaccagccaatggccaagctcgcgcttgcaaagtgtcagtccggcgcgcttggcgtcgtgcgacctctaaagcgtctcgtgctgacccttttctcgctccccgacgtcgtcgtcaccagggggtctccgggccgacacgcgccaggtcgagcggaaaaagacgggccggccaaaggcccgcaaggccaatacctgggtcaaacgttgaaacctatacatggcactcagccgaagtcagagacgagaactgaaagggcaggtgcgggagcagcgagaaagtacttgagagcgggaggccgcgggcgaaaaatccgaaaggtctcaagaatctcgacggaggcgcagcgcagctcagcccgcccgcctgccaacacccacgactctcgccacgatggaccctttcaagctgctcaccgtcggcgcctcgttctcgcgctccaagaaggcagccgcgaagaacggcggcagtgctgctcctccggctcggcgcggccaagacgtcgaggccctcttccacaagtcggcccgggtcgagctcgacgcgagcggctccgaggatgagtctgcgagcggctcgggcagcgacgacgacgacgcttcggacgaaccgagcacgagcatgctcccgacggagctcgacttctttggcgtcggcggcggcggaggagctgcgaaggctgagggcgcgagtaagaagcggaagcgccagaagacgaccggtgagttaggtcgcagcctcccatcctcacgagggtgctgacctgctctccttcccgactcttttctgctcgcccaaagttgccgcccgctcgctgccaccgacgaaccggctgtcgatcaccggtccgtcggccccctcggcgctcgcctcgcttgacgagtttattgcccttcactcgccgccgtcgtacgtgatccagaacctccgggcgatgggcatcacccagatgtcagaaattggccgtggtgcggccgccgtcatgatggccgaccgggacctgctcgcgctcgcgccgaccggaagcggcaagacgctcggctacctactcccgctcctgaccctgctcaaggcaccggcaaaggcggcggcggcggcgaatgcggcggccgacggcggcgagtcgtcgagcgacgaggaggactcatccgaggacgacgagccttcgacctcacgagcggcgtcgacggcgaaggtctcgccccgggccatcatcctctcgccgacacacgagctcgcgcagcagatcgcgtccgagacgcttaagctgacgcagggccgcaagtggcgggtcgccgtcctgaccaaggccaacgagctcagcgtcgtcgagcgcggagcggacgtcctcatctgcacgccccagcggctcgtcgctgcgatcgagcgccgcgggctctctctcggccagacgaagcatctcgtcattgacgagtcggaccggctgctcgacaagacgtttctccctgtcgtcgacacgattctgacggccctgaccgacaaggcgctccgccgggcgctctttactgcgacgctgccgtcggatctcgaggaaattgccaaggggatgggcacgggcgagtcaatccgcgtcatcgtcggcatgaagtgggtctcactcgccgctcgcctgaaaacagctgcgcttgatgctgacctcgctcgcctcttcgccgctccagggacattccgaccgcctcgattaagcaggaactcgtctttaccgggactgagacgggcaagctgctcgcgctccgccagcacctgacgtcgggcgcgctcgtcccgccgatcctcgtctttgtccagtcgattgagcgcgcgacctcgctcttccacgagctcatctacgacgcgctcccaatcgaggtgatccattcggagcgaacgccgaaggagcgcgagcgcgtcctgcgcgactttcgcgagggcaaggtctgggtcctcatctgcactgagctcatcggccgtgggatggacttccgcggcgtccgggccgtcgtcaactatgacttcccgacgagcgtccagagctacgtccatcgtatcggtgcgtgccgcgcttctttgccttgcagcttggccgaccggctaacgcttgcccgccacccatcgcaggtcgcaccggtcgcgccggccaggagggcaaggccgtcaccttcttcaacaacgaggacgcgccctatctgaagatgtgcgtcggccccatctggctcttgtagacctctgcctcgctgacctgtctccttcacccagggtcgccaacgtcatgcgccagtcggggtgcgaggtgccagaatggatgcttgcgtacgtcctaagcttgcaatgcccgcacacacaaggctacttctgacccgttcgtgctcttgtcgctctactcacgcaggctgaagaacccgtcaaagaaggagcgtcgcaagctcaagtcgaagccggtcgaccggatgggcgtccagacggcggccggcagcggcatcaagcgccaggaggcgaccaagcggcggtgcgtcctgctcgtctctctctcatcatccctttgctttactgacgcctcgacgcccgcacatgcagcgagatggttgagggcagcaagcgccggaagctcaaggtagctgcggaggaggggagcgacgctgccgggtcgggcggcgaggtcgagtgaagcgacggagaatagcatgccgtccgaactcgatccctttcccgtatcttcccaatcgtgccgtgttgttcgaggaaagccactgcttcagtagtcggtgcaacaagtggaccgacggtcggagtacgtgcagcgccgaaccgccgccgccgaaacgctcctccctgccgttgaccgacagcgacgccctcctgtcatcctctctgccaccgtccttctgccaggccagctcgatctctgcaaggtcacctcgtgcgcacaggctccctcgcagtcgctcagcgcgctcgtgtactggccctgctgtcgcgacctgcaggcccgccctcgacccggcgcgcgctcgagcctacccgcgtccgtccccccctccccacctgaccatcttgaggctcgcccgacaagcgtcgcctggaccgacctctagcaaagcacctcaagctgacagggctactcgcactcgatcctgctctgctatagcgcacctcagtcgaagcaaacggtcgccggagccaagctcgccggccagctcgcacgcggtgagctcgacttggcctcctgtgcgcaggcgggcgctcgtgtcagacgctgacctgctcgtccctttagcttgccaacgtagcgcccaaaccatcattatggatcccactgaacctctctctgcccggtcttcgtctgtcgtcgaagacatgtcgtcggcaggcgacgcggttccggtcaccaacgtcggcgacgcggtcgagacggcgtcgacaacgacctccctcccaccaaccgaaaccgactcgtcggctgccgcacagacggcggcgcagtcggtttcaatcgaggccgctgctccggttgctaggggcgaagcacccgagcctgagcgcaagcgtgggcgtgccgacggcccgctcccggctggtgcgtccgtgcgcagtttgttctcgaggcggctcgcgttgacccaccttgcaatcctcctcggccggacagacgcctttggcgaggctcatggtcggccgcacaccgagcggacgcgcaagaagcgcgacatctacggcgaccacgcgctcgacacggtcccgcggcccgagcagtttggcaccgctggacagagcatccggctctacgtgcgtccgtcctaactttctgccatgcgaagcaccgagctgacgtccagtcggctgcttgtttcaggtcaacgcgttcgacgtcagctatcccgacagtagcctcgcccacaagcccatcttccactacgacgtcgattttatcatcccgccgcgtaacccgggcgaggccggcaagcaaaagaagatgaaccgcatccaggcttgggagctctggcaggagctcggtccaagcaacccaaatattgcgggcctcttcgagggggcggtgcgcgtcgcctagtcggctcgtctctccgtgcctgaagctgactcagacgctcttctgcttcctgacaggctttcgacggcctcaagaactggtgcgttcctttggcatcgcgactgggctcgcacctcgctgaaacgtccgttctgctcgactcagcttctcgccggtcaagctcatgctcaagtcaaacccaagcgaccccaacgaagtctactccagcgagctcaacgaaggccaccttacttgcgtctacatggagggcaagcgccagcgggacctctgggtctcgtttggccttgtcggcaccgagggccaaatcatgccggccaacctcctgcgcttctgcgcgcccgaccacaacgccgacgccgtcgccatcgctgcccgcgacaagtcaccgattgccatccaggccttggacgtccttctgcgccacgacgtccggcggcgccatcccatcacgtcgggccagggccgcaagtttttcacgtcggacaaagggcagggagctcctaaaggggcgaccatcatgtccggaatcttccagtcgatccggccgactctctcgggccccaaggtaatcatggacgcgccctactcgatctttgtcgccggcggccagctcgaccaggtcgcggccgccatcatcggcaagaacggcggcggcggaggaggcggccggagcggaggcagctacggaggtggcggccgcggaggctacggcggcggaggcggcggttatggcggcggcggtggctacggcgaccgtggcagcgccccgctcgacgagcgcgactggcggaccgttgcgcggtacctcaagaaggctcgcatcaccctcaagtgcgtcagtcgcgggcgtctctaccgatgagccaacctgaccccccccccctcctcctcctcggcaggcaccgcgacggcggcacgttcgagatcaagggcttcacgcgcgagagcgcgagcgagcgccgcttcatgctcgaccacaagcctcggcggggcgagcccgagcccgacccgccgatcccgcccgagaagatcaccgtcgccgactactactcgcgcaagctcaacatccgtgcgtcatcgttagcgcgcccttcgtcttggcgaagcgactgacgggcttgcacatcctcgtccttgcagagctcatctacccgcactacccctgcatcgagattcgcggccggcagctgatcccggtcgagctctgcaacgtacggccgttgtcctgggatgcctggctctgtggtcatgctgacccaggctgctctatctctctctgctgcagctcttgcctggccagccggttccttttctcctgacctcgccggagcagaccgcccaggtcatcaaggccgccggcaagccaccggccgagcgcaagcgcgagatcctccaggcccggatcgaggtacggtcgacgctctccctctcttcggtcggccgtcgcctcagatgatcgtccacccccccccgtgtcaacccaggcgaactaccacaatgagaaggggcccggaggcggagaccagcggctcggcgcatggggcgttcaggtctcgaaggagatgaccaaggtgagcagcgtccgtcacccttgccccctcggtgcccagcttccttcaacatggcgtccttccatcgcttgcaggtcgtcggccggatcctgccaccaccacgcgtcatgcacgcaaacggtcctgccagaatcagtcatggcaagtggaacctgtgcgtctggctaagcgcctttcgccgcccacggatggacctctcactgacgcaattccttccgtcctaccgtcgactgcagggtgggcgctcgctgtaagtcgacgagacttgctgcagccgagactctcagcatcaactgacaacatgacccccctcgccgtccgcagtcatcaagcccaacgttccgctccggtcgtggtcgatactcaactttgaccgcgagatccaggagcgcgacatccaggactttgtccggacgctgatccaggcgggcagcaacgccggtgagcctgtgctcgccctcgccggtgatcctgcgagcgctatcgctgacgactcggcggcttcttctcgcagggatgatcttcgtcgagaaggagccgccgattctgtcggccggccccgacatcaagaacgcgctcaagacggcgggcaaggcctgcattgtccggaccggcgaggtctttggcgaacggctcttgcctcagctcgtcctctgcatcgtccctgaccggtcggcggccgagtcgcggtcggtctacgaggctatcaaaaagatcggcttgatggacctcccggccccgctcgtcacccagtgtccgtcttgctgctgctgctgcaaaaggtggccagcatgagctgaccttctgagcctgcttcaatctcgatggacaggcatgaagggcagcaaggtcaggcagacgcggccgaatgccgcgatgcagtatgccggcaacctctcgaccaagagtgcgccctcgtgccctgtctgcagactagaggtcggcgactgacccttctcttctttcccgcagtgaacctcaaacttggcggccgcaattggacgcttgacgccaactcgctgccgatcgcgcccggcaccatcgtctttggcgccgacatcgcccacgccgccccgggctcgcgcggagcctcagtgcgtcgcctgccgaaccaaggcaaggagctctgcttgctgacatctacaccgctatcgtgtctccccaggtcgcgtcggtcgttgccgccactgacggctcctgctcggactggaaggtccgtcgcgagctctaaagatctcaactatcggcttgctgactttctgttcctcccccaccaggccgagatccggagccaggacgccggcgtcgagtcgatcgccggcctcgacgagatggtctatgcgcacctgctgcagtacgagaagacgtctggccagaaggcccagtgcctcgtcttttaccgcgatggcgtctccgagggcgagttcaagtgcgtccggccctccgcttcatcagctctttccagctaagctttgagactgacgagccgtttcatctctcccgcacaaacaggcagatcatcgacgtcgagattgctggcgtccgggctgcctgcgagcgctacgcgccgggcaccgccatcccgatcacggtccgtcctctcttgtctgctcgcgccttcttcaaggccgtctgctgatcccgtctcgttcggcacacagttcatcatctgcggaaagacgtccaagacgcgcttctttgcggccgagcaggatgccgggcgctgcgacaagaacggcaacctcccggccggcacggtcgtcgagtgcgtggcctcctgcgccccttccttctgctcgtccgctgataaaggacggtcgtctggctgagcagccgctcgatcacgtcgcccctcatctgggacttctacctccaagtccgcgctctgcgatccccttccgcctgtaccgaccgacgtggcgctaactctgcctcccttgcctcgctctataggcgcacagcggactgctcggcacggccaaggtttgtcacctgcctgaagatgcttcgtgaccaggcccagctgaccttggcttacccttcgttgctagcccacgcactactctgttctctgcgtgcgtcttcaaatcgctctcctctctcgaccgcggctgaccgcttgatcttccgcaccctctcaggacgagaacggctttgatcagaaccgcatccaggccctctcgaacggcctctgctggctgtcggtcgctgcctcccatcgctcaggcggctcgaccacctcggctgacacgctccctttttgatgtttgcagcttcggccgggcgaccatgggcgtctcgctggtcgcaccagcgtacctcgccgacctcgcgtgcgagaaggcgcggctgctcattgcgaccgactttgacgacgcctcgacggcgacgagcaactcgaacgagcagccggcgctctacctcgatccgcttaagatccagacttcggtgcgcgcctggctgcctgcctcgactacgcctttttcctcgcgctgccgggcgactgatcatcctctcatgtgatgcagcttaagcgcggcgccggcgttgccaacggctggtttgtttgaggcggcccgctcgcctgcgacagcctctcgtcgactcatcgcccgtccgatcttctcgaccgcttctcgcgcgacgcttcgctcacccagcgcatgtcgggtctcgccagcgtcaactcctctgtcccctgtgcgaccactttcgccgccgcctcgcccaccgtctcgcctcctcactctacgaccggccttcccagccctccccgtcccgcctcccacaccacgcatgtccccttttttctgcttgcaggcgaggggttcgcgagcatgcgatcctcagctcccttgaccactcgcttcgccgctggctgccagctctgtcgcactcgctcgtgcagcagcctcctcttcgagcttgcgccgcttgcgctcctcaaaccgctgccgggcgctccctacggccgcctcgtcgttgcgcttctccttgacgccgacctcgcgggcgacatcacgctcggcctcgagcttgcgttggcgctcctgctcctcagcaaactgggcacggagcatcgcgtccgtccgagccttgatctcgcgggctgacgacgcctcgccgacgcgtcgcgaggggacgtagccggatgtgcctggccccttggacgagccgccgctggccgtcgggagcggcggcggcggtgctcgcttgggaagaatgttgagaccgggcgcgaggagcgagcgctcgtcgacgacttcgccagagtcgttgagctcgaccgagaggcccttctcgagcgcctctttgatcgcctgctggtcgccgtgacgtgcggccgaatcgtcggctgctgctgcgggtgggggtgccgctgggccttggaccggccgctggatggtcaggttcgttggcggcagaggagcctcagcggcagcgagcgaagcggcgacggcagcctcatgtgcttgcgacgactggtcgaggtaggccgagtagaaggccgagatgccgcccttggacgtcttcttgagctcggctgcgcgccaggagcgagtgagggcgggtcagccagaaagaacaccctttacggaactggcaggcgactcgacgcaccttcgcgcttcgcctcctcctcttcggccttccggacggcctccatctggtccttgtaggcctgcgtcacaaacttctccttgtcggcaaactcgtcaccttcgagtgctcgctcgcgctcgagcatcttctcctgagcgcggatctggtcgagcttgcgcgtcgcggccgaggcaatggcctggtgcatgtacttgggctggagaagcaaggaaggagtcgagagtcagggcatgtccgagagagcattatctcgctcgacgggcgctgcgccgagaagaggcaagcacgagctcgctagcgtaccttgcgatccgacgactcgtcctccctgcgctgcttggccgccttctcggcgtccttcatgctgtcccagacttcgtcatacgcaaacgccctctggtcgagcccgagcgcgacctcctgcttggtccggtcggcccgcgacggcttgacggcctggtggacgagcttctttgggtcgacctttggcttgccccatgagcgacccgaggtcgacgactcggcctcttgcggcggcgccggctcgtcgttgtcggccgcgagcgagaaggccttgggcggcttgacggcaaccggtgcgcctttgggcttcgggagggcgaagccgctggttgtcaggccgccaggagccgctcccggtgcgcccgccttcttggcaccgccgatggagaacgagatcttgggcttggtcgcgtcgggagccgacatggtgctgggcaactgcgagtaggggcgtcgagtaagcgatcctgggggtcgtcggtggtgacggtcttgaggcgaaagcgcaggcggcaagcgaaggcgaacttggcggccgaccgccatcttctcctcgaccgtcttgcaccagcaactcactcgtagacgaacacgtacgtagaccggcgtgcatgctgtcctcttcttcagacgtacgctgatgctggtcttacttcttgccgctgcagcttgaccgtctccttcctcccggcccttgctttcccgcgcggctcgacctcgcccaacacgaccgcggcgcttgctcgcctcgcttcctcttcgacagaggcatactgatgtcggacgagccagtcaagcttggcgagctcgttgtcgtcattttgagagctgtacgtagggactggatctgggcgactggccatcagtcgctttctcgctgacgccttccctcgtccctcctgcttgctcccagcggcaccttaccaacgtcaagatcgccaagcaggacccctactgctcgctcgccgtcggaaacgagcggaatcggacctcggtcatcaaaaagggcggacagcaccccgaatgggacgagcaggtcaagttcgacatcgtcgaggatgccgccgacttgctcgcccggaccaaggcggacggtgtgagcgcctcggagagcagcagtagcctcggccggcccggtgcggcagccggcaagaagaaggtcttcgcaaaagggaccaagacgctcaagctcgcggtctatgccgacgcgccgcgcgagccagagctcgtcggcgaggccgtctttgacctcgcaaaggcgctcaacagcggcgaggacgagggtgcgtcacgagccgttcgcttcttgacagcattcatgctgacaattgtcctttacctggctcgacgtagagtggatcacgctcaaccgtaaggaccgctacgcaggcgaggtctacctagagttcacctatttcatcgcggtgcgcagccgctcttctcgttcgcgacgtcagctcgaagcttcgcctgactcgatcttcctatccgctcgcagggcgctccccctcctccaaagccgccgaagcgcctgtcgggctccggctacccaggccagtttgattcgatgccgtcgtcatcctcgctggcggccatctcgtcgatccggcacagcgcttcggcctcgagcatcagccacctctacaatccgccctacaccccggcgcccgctcgcgtcacgacgccgacgcctgctccttacaatcagccctacatgctttcgccggctgctgtcgcggctccggtgccgacgccgctgccatccgtgccgaacgcttacgcgccgccagaatcgtcattcccttcctatccgtcgcagccggcgctctcggctcacttgtcgtcgtacggaccgccgccgccgatgccgtcgcatagcgcgcctccgccgccaatgatctatggctctccggtcccgccgcagccgtcgtacagcgcgccgcctcagccgctgccgtccccgacgacctacccggcacctccgccgccgtcttcgccctacgtcccccacacggcgcagtacggtcagccccaataccagcagccgcctcagcaacagcaacagcagcagcagcctccctggtcgcagcccgcctatccgcaaccgcagcactaccagccgccgccgacgcctcagccgcctccaccgccaccgccgcctcctcaacatcagcagcagtatcatccgccggccccactgccgacgccacctccgccgccacctcatccccagcacctctaccagccgcaaccgcccccccagccgcagcagccggtgcaggagcagccgccgtggttcgcgcatcagcaacagcaacagcagcagcagcccgagtctcagccagcctatgccgactattctccgccgccgccgacggcctacgcggagcagcagcagcaccatcagcagcagcagcagcaacagccgctataccagccggcctaccagcagccgactccgtaccaggacccttaccagcagcagcagcagcctcctcctcagcaataccagcctcacccttacccgccctatcagctggcaccgacgccgtcgtaccagcaccagcagccccctccgcaggccatgacgcccgcgccctacccgccgccacagcatcaacaggcggcaccagcggcgtatgcgccttatcagccggcgagcacgccccaccctggataccagctagcgccggcgccagcatatggctggccgccgcatcagcatcagacgccccagcagcatcagaatggctggcagcgatagatgtctacaggagagtcgagcgcttaaggcggaaaaattcagaacgctgctcaaaaaaggcgggccgcagcccgagcatgctggtctctcgtcgccttgttcgctgcaagacgacatcaatcgcgtttccttgacggacttgtcgacgctcgagcagtgagacgattggcgctgacgccgttcacgttcgtcggcctcggcgcgaacttctcccagccgtcgaggccggccgcccaccggtctgtgacctccaagccccactcaccgccgagattcagcaagctgagcacggcggcacgagcgcgcgacgcagcgccttgaggcgtctgacgaggcagaatctcggtcaggccgcaatgaacaactgcggaggtcgcgccgacgacgaagccgagcaggatctggaagggcgtgtggtatgagaggtaccaactgaagcacacgagccaaaggtcagtcgcacgttcgatggacaagcaaagctcgaagcgacgcaccgcgagatgcagacgacgaagctccagatgcctaggcctgctaggacgacggcgcgcttccaagcccagacctgccgacgcaatggcgtccaagacgccggtgcctgctggacaaagacgagatgaaggccgaggaaggcgaagaggtagccgaagaactgcgagtgtgatgaaggagaggcgtctgaagcgagaagcagtcagtatcggcattcgggcgggcaagccagggcaagccgacccacagccggagtccatgtcggctgcgatgggcatcaagggcgagtcagcttcctgagagatcggccgtctacctgctagcagcgaccttttcggcgagactgacgatagggccgctcctccttcaggtgccgcttcaagacccagctaagaagctcgttgacgagctggccggcgagcatgttgagcacgacgagctcccgctcaaagacaaagacggcgaggtaggccggcacgaccaggatgggcgagagcgtcattatggccatgagctgggagagcttggagctggcatcgtctgcgagaggacaagaggaaaggccatcagctgttgagcgggagtcgcaagtcgagcggagaaggtcgtcgacggctgatcgacgcacgaagcacgtacagtagacgtgcgatagctcgagcggcgcgagcgcatgcgaagggccggcgtgcatggctcgagaggattgaacatccgatggcaggtgacgggtatgaagagatgctgtcgaaggctaaacctcgacctgcgacttcggcgagcgtcggctggcgcgcagcaagaacaacccctccgacgattgcttcccttaggctcgcgctgtgtttgtcaaaatcagatcatacaagaggacgtacagacgatataagggacaggagccgatcaggaagcctgagcgactctgaagacgtaagctggctggtgcttagtcaacgccgccgaaggaagcgcgatctcgaggactcggtgtccgtggtacgaccagtctagcgagacgccgccttgaggtccgaggagggtgatatggtcgcctttcaagacaggcagctgaactgggatgcggaagacaggcgacgtcggcggctcaagggagatgatgtagaaggcatcagccgtccgggtgaaacggaggtcgaggccggtctcctcaacgacgagttcgggaagcagagcgaaagggatctgtaaagagctcggtcatctttaactttggcggctgaggagacaacgctggtgagactgacggttccaaagatggcctcgccgttgaccgcgagccagcggccgacgcctcgcaggcgattttgcatgacggcaatgatctcgccctcgcccgtcgggccgacgttcaggaggtagttgccgttctttgaggtctttacggtaacgacaagttagtagagcgagcgttcaaacgctcagggacgaggaacgaaacgcacgatgtcgatcaggttgtggacgagctccgtagccgaacggtacttatctgccttcgtgtccctgttgtagccaaaactgactaagaatgcaatacagcaaatcagcgtctcgtcagcgaggagaggtcaatgtcaggaggctcgcacatgggtcgatacctgctttcttacgtcgatcagctcatatcgagggcattggcggcagcgtagacgcaccctcgcacgtctcccatttctgtgtctggacggtcgcgaaacgctcgtactcgggcgtgctgaaatcgggcgcgacgccgcagcctgaagaagtcgatgagtagcgtgcgtcagaactatcaaggcgagcgctgtcaaaagggcgggcgtacggttgttggtagtgacttgccggccggcagatgaggtgctcgcgtaccactcgataaggaaggcctgtccaaaggaggtaaagattagttggtgattagaagaggcgccagcaatgtgctctcgcgcaccgagctgtggttagcgccgccgatctgtgagaggcggcgcccgcgtcagtgtcgcaggtcgcacggcccgagcgctctcctgaagctgactgacgtcgcaccacatgatgtcggtccccatctcgccgaggatgcgcatctgcgcgagctgcaggtcctcgacgtagtcgtcaaccgtgtgccagccggtgtaggcctcgtgctcgccgggatggtagacgtcgggcgcaaagccgccgggctgccgttgacgccgggatgtcagtgagcgcgcacaaagaggagggtagtatgtagactgacgaagcgctcccagccgtatttggcgtagtcgggattgtaccactccggcatgctgagagcgagcgaccgctgtcagcaatgttaggacaagcgtcggaagcaggaggccgtttgcacctgaagtagctgcctttcttcagcccaccgtgccggtcagctgcgtcaaacagctctcggacgtagtcacggccgccgggcgcgagcttgaccgacgaacggtcagacgaggcgccggtgtcgaagagcgcgaagccgtcgtgatgctggcggcaggaagatctggatcagagaaggctgagaacagcaggcattcatcggatttactttggtcgtcagaacaaagtacttcgctccgctgtcggcctgggccaaaggcgatgcatagagcgttagcgagtgagccactgccggagattgagcggtcgacttacgaagagccgggcccactcgtccgcatcaaacttggagccgttgaacgagtcgatgaagtcgtcgtactgaaagtcgggcccgtattcgtcaagatggtgctgccaggctgcggcagacgctcagcgactagtctcgacgagtgcgatgaggaattaagaaacgcactgtccgacttctgctcggcatcctcatgcagcaagcgcctgtagtgaattgcttaatcagcatatcgtgaagcgaattgggggagtcgacaaccgacttactggtaccactcggcgtagcgcccgcgcgatgcccacgcaggcacgctgaaaaggccccagtgtacgaagattccaaatttggcgtcgtcgaaccaggccgggctcgaatggaaagcgaggtcggcctgcacatgcgcgtcagaggcggtgcatgggttgatagaggaactgagctcgactgaccgccgggtctaggtaaaaagccgcccagtcacgcacgagcgggcctttgactgtcgctcggccgaggtcaatgtgtttgctgtctgcgagcgtgccagtcactcggacctcaccatcccactcgttttggtcgcttgttgtgtcagagtgaccgccggcggaaggtgcgaccaacacctcgacgtctcgtccgtcaccaggcatgagtcgccctgccttgcctgcacggacgacctcgaacccggcagggaggccgtcgaccgagaccgacaagtttgagcgcagccaggcttgtgagtgcgggacgagagaggcggacgcggcgttttcgagcgccagcactagcgattgggctttgcggccgtcgggcagctcggtccagcggctcgtcatctgcgccgagcgaatacgcagggccagctgagcggtcgatcgaggatcaggcagggcgagtgagagcgcaaagacgtgtaggcgattctggccgacatcgcgagcgggcggcaggcgaagagcggtcacgttgagcaaggcgatggacggagggagcgggacgacggcgtggtggatgtgcgtgacgttccagttgcggccgtcgggcgtgtggtggtaagggctgtgggcaggggtggaccggctgtcagcgaccgctcgctctgatgctacaggcgaggcacggaccagacgatgggcgccttgttcagccactgcgggacgagagatagattagaagcgctcttcggcctgacgagggagacttgccacgcacatgaaggctccaccagtccttgaccgacactgtcagggagggatcaaaggcaagtcagcgacggtttgagcagcaggatcggtcaggtgatcggctgacagtccagggatcgctcggtgccatcctcgaagacgacagtgatggcctcctgcgagtcgcctacaggtacggcagtcatccaacattcagcctcggtcaacagacagaaggctgggaggcaggcgaaccatcgaagaagtcgcccgagacgagcaggtgtagggccaaaatctcgagcggccggtcgaggttgagtgtctgccggcaagaggtcgaacccgccaacgtcaggggtagcggctcgagcagcgtgacatgccgctcacctggttcgacgccaggacgtgatctcccttcttgcttccccaggtttgcggcaaatcgaactgcagtacggagtggcagcaggtcacccaaggaaatcggtctcctccgcagcagcccggcaagcgacgaggtaacctggctgaggacgcacctcgatgccgtcatcctcccacactcctcgaggaagacagtccgcgtcggccggatagagtccgcctcggccatcaaagctgtggctgtcggcggagggagagccagaggaggcggctcgagcgttgaagagccgactgaggtcgacaggggctgagctgcgcgatggccggccgacgtcgggcggcgggctcaggaggttgagaaggagggtgagtggtgcgacgagctggctgacagccagcatgcttgtggccggccttgctatgctgctagactggcggcgttaatgatggtcggaggggctggaggatgcgagctgaagacgggagaggaaggccagctcggctcggcccgtcaacgtcgaccctgttgctgctgctaatcccctcgctctctgactcaagctctcattcgtagcttcgaagacgccactagcagtaagatcaagctgcaggttcgtccttccttctttgcctttgatgtcggagagactgacggtcgtcttcgacgtctgccctcctgctcaggccgcgcagctcaaccagcgacatgctgcgagttgtcctgccgacttcctcgtctgcggatcatgcgagatagtctcgatacaagtacgtcttcctgtccgcaccgagaaaagagcaaagtactgcctgctgatgcttgtctgggcctttgagaggtcagatgccgcttctcatcgtttctttactctacgtgccctacgtggccgtttcctcgagcccatcggtcctcagacctttgccgtctcgcaaaccaacaccgactccgactagagcgtcgtctaggcgctcacgaacggactctattggctgttagtcgcttctctggtcgcatggcctgcccggcggctgacagtcctcgccctctcagcttcgaccacgcttctttgtcgtctttcctgtcgcacaaacatttctcgcgaatatcgcgggcgagatgtgacaaccttgatcgtcgccgacctcgacgacgcgcccgaggcaaagcgcaacccggagcgagccgtcggcaccctttctgcctcaatccactcgagattcgtgagttggcccgctcagatgcttgcccgactgattctcgctgctttaccaatactaacagtcactttgtctcatctcagctcagttacggtgacggcatcgacgacggccgcttccttcgagcaatcaggcgacgattgactcgcccgaggcgcacgatctcgacagcatgccattggccttcgccatcgttggtctcctcgcatgtacccgcgatggcatcatgctcgcgggatcgagacgactcatgcatttcccgtcagctttctcgaaaccgctggatcaagcgtttacgccagcttacgacggtcggcttgctgccgtcacaacctccatctccaaccgcttgccgttcatgctggcagccccgaacggtcgacacgcgcttacctgttgacttaaggtcgggccgcatcccagagcagctgatctcgcccccgttgcatgcgcatagacctccctttctcctgccgccgttgctatcccttctgcgcacagtcgtcggcccgaccgcctgccgaacgatcgcatgcgcaacgtctcaattctcgactgccggaggacaaagaaagaggaaagcaggttgtgtcagtgcctatgctctcaagccgggtgttgcgggtgatcagacgtacggtcgtaccagccgctggcgggcaggggcaagcccgagagcagggcgtcaggcaagtcacccattgacagcaggcggagaaggagagggcgtacatccacttgccctgcttgccgagctggtagcggatcacctgaaaggaggagaggccgtcagctgagcgagtcaagggaggcaagcgatgcgcagcttcaacgggtcacgcaccatccacgggacggagagggcgccgccgagcgcgccaaagtaaaggacgcggaagagcttgggccgacgaatggccattctgctgaagggaagggcctgtggcgagagatattgaggtggttcagcgagcgaggcaagcagaaaggggtcgtcccggcaagaaggaggacgcaccgtctcgaccgtgttctcatagtggatgatgcggtcggcctcggtcgcacgagggatgagagccgaggcgtgggggacgaggttgtcgaggcgcatcgtgaggttgctggagctgttgaggtggtggttgggaggaaggcagtgagagaaggcgaaagccaagatgtcggagtttgcctctgccgggccgctcgggacaggtcaggattgccttgccctcgacggctgcacctgagtcaaagataagaggagcagagctcatcgcacaaatgtagagcggcagtcactttcccttttgaagccgcttctggtcagcgatgatagcctacaagtcctcttttggcctgaccgacgcccgcaagccagtcgacagactcgactcggcaggttgcctgtccaagaggaggtactggagcaggcagcattgcgagctcgaatagaaccgatcagagagcgtgctgcgagcgggcgacagagcaaggtctgccgcaggcgtacgctgcggcgatcaagaaggctccgcgcactaggagccgtattgagtacgtcgccaagcacgccgcgcaaggccttgtcatgatcaagacccggtgcaggtagggagacacgactggcgggattcctaggcggcttgtcctctgcatggtgccgagcgggcgacgaagatagagctgtcgaggccggtgggtgagaaggaaaattggtcagcgtcgagctagagtagaaagagcacgagtcgcacgcacctggctggaagctaacgagcaaattgcggggccagcggtcgagattactacaagatgacgagatcagacaagcaggtgttgaagccatcaagggcgcaccggcactacaggctgcggtaaagcgacctgagcgcgacgcagatggcagctgtgctcgcaaggccggtcagctttcagcctcgcaaagagggggagcagccgggtacactttgtcaagcgccagaaagcgcattacgagccaacgtgcgacaggccttttctgcagaagggcggacgagcacgtctcggcgtcagtatgcggaagggagctgccagctagaaggggcgaatgcactgctcggggctcaccgagggcgagcagtgagggtcattcttcgaggcggcggcaccgagatgaatggaaagagaagagagccggtacttgtggtcgggagagaagcgcaaacaattagagggggtgaggagattgtcagcaggagtgggtggagaggctcggcgctaaggtcggcctggcccgcccaccccttcagctcagccttctcctggctgtcgcgccagacgtcgggataagggaggcagcagacagtcgagagatgagacgcgctcgaaaagcggccgcgcaaccagagggacggttagggtcactgcagcatcgaatagtgtaaggcagggtcaaggagaggtgggacgggcacagagacgaacggggtagggtgtaacgggcatgcaatgacaaaggcgggtctatggacgggaggcgaggagtttgagagttagacgaggggaggagacggaagcagaggaagggagcgcaacttagaaggcgaaaaagcgagggcgtggagagggcgggctagcttggaggggcgagagaaggatgaggtttcggggtggagggcgcgtgcgagagagcgacaagagagcgagagagagcctgtatacatgcatcatggggacttattagatgcatcgctcgctggcacgcacgcgaagagagggcggcgcgagagatggtcgacccctccgatcctccccgacaaaccctcattgccagcatgcccggcggactcggctacgacgagcaaggctcgctcgcgacatactttgcactcaccttcctctcgcttgctatcgtcccttcaaccgtctggtccctccgctcggccggtccgtcctgcattctccgccctctcgctcgctccctcacccatagcctgacaaccttcccatcccctctctcccggcagacaagcaaaagaagccggccaacaccctcccgctgccagagaagcgccgcaaagcgcacaaggcccggctctttggcaagcccaagcccaaagctcggggcctctcgcgcaagtgcgtcctctgtctccctcctcctacccttgccgcttcgaggcatcgcgcgaccgattcgcctcgcgaaagagctgacactggtgctctcgctccgtaggacgctcctcctgctcgtcggctgggtcctctttgccggactcgcctacaaggccgcgacatcggaggtcgtccagacggccgtctacaacccgtttgagatcctcggcatcagcgaggtgcgctcgcgcccgcccgctcctgctggccttgagccctgcccgaggctggacagaggaacgctggctgacgcgcgcgcgcgcgcgggctcctttgactttggtcgtttagtcgctgactgagaaggagatcaagcgcgcttacaagaagctctcgctcaagttgtgcgttgtcgcctccggccgctttctcccgggcgtgccggcagcagcagcagcagtagccacgtccgagcggccttcatccgactgactccctccctccctccttctcgcagtcatcccgacaagatccgcctcgcgcccaatgagacccgcgaatccgtcgacgaccactttgtctccctcacgaaggcctacaagtcgctgacggacgagtcggtccgcgagaacctcaagctctacggcaacccggacgggccagcccagcgtgaggaggtcgttgcgatcccgcggtgggtcgtcgagggggggaatggagggtgggtgctggcggtctatgggctcgtgtttggagggctgatgccttggttcgtcgtacgtcccgtctccactgcccgcctgctgttgtctgctgtctgctcggcttgctcgtccgttgctgaccgcctcgccttctcccctaattgccgcacgcgcgcgcgcgctctcagggcaaatggtggttcggcactcgcggccacacgaaagaaggcgtcctcaacgcgaccgcgacgacctttttccgccggctcgacgaggacgcctcgctcgccgacgtcgtcgcgatcctctcgtcggcggccgagtttgcgacgtctgctgccgagctcgcaaaggcggacggcgggggcgagggcgggaagagtaagaaggaggcaaaggcggaccttgggaggcgcgaggaggagctgaaggctcgggcgcaggagctcgggcttgtcagcggcggcaaggaaggagtggaggttatgggcgggacgtttgagagtgctggtgcgcgcagggcgggcttgaggatctgggggcatctgctcagggtcgaatgggaccagccgggcgcgcgggaaggtgcgtcccttttctcctcctctctctttcggcgtagccgacttacaagctgatctcccttttgctgctgctgttgcctgcctgcgcacagagctcggcacgctcctcgccgctctcccgccgctcctcagctcgctcctgaccatttcgctcgcacacaattggctcggcccgagcacgcacatcatgcgcctccacggcctcctcgcgcaagcgacgctcccgggcctcccgccgctcatccagctcccgcacctcacggccgaggcggctgtcaagctcggggagaagtttggcgtgctgaagggcgccgacgggggcgatcggtggctcgcagcgtttgccgcgcttgaggagggaatgaggcggaggcttgtggccgaatgttgcgaggaggcggtcggcgagaccgagatccgcgagatggtggatgtcgcggagagctggccgaagctcgagctgctcgacgccagcttcaagggtgcgttcctcctcctcctcctccttcacctcctcctcttaccgcctctttcgagtcggcctagctgacgagcattgcccgattcgcagtcgtcggcgaaaagacaatcacaccccaagcgatcgtccaagtcgtcctcaaagtccgcctgacaacgatcggcgccctcgtcggctcgctcgccggcgccccgcctgcacggcgggaggttggcgtcgggaaaattgccaacttgccagcggacgacgacgacgaggatgaggaggagaagaagcgaaaggccgagcaggggaagaggaaggcgccggttgtcgcgcacacgccgtactggccagaggtgcgttcccctctttctctccgctctttgcgcgcgtgatagacgctgactcggcttcccctcgtgcgcacgcgggcggttaggaccggcccctccgttactgggcgatggtcgtcgacgtcaagtcgcaaaaagtcattgtccagccggtcgtcgtcccgacgctccatccgggcgagaccgagtcgttcaacctccagtttcaggcgccggccggcgcggggctctatacgttccaggcggtcatcgtcgggaattcgggcgcgggcggggaggtccagcaggggctgatggtgcgtttcgctcgtttcgctcttgctcgcgcgggtccttgtcgtcctccgctgactcctttcaaccccttcgctgcgctccccgcagctccgggtcgacgagcccgccgtcgaagcctcagacgacgacgacatttctgagccggacgaagactcgctcgccggtcagctcgcggccatcaagggcgagaaggtcaagccgaagcgcggcgccgacgacgacgacgacgacgaggacgagagcgaggaggagagctcgagcgacgaggagggtccgaagggcaagaagaacgacgacgacagcagcagcgagagcgacagcgattaaaacgtgggttcctcggcgtgcttcgatcgcatgtgctcgttacttcatttcgctcggtttggcggaggcgggggccagggcgcaagttgagcgctcgactgacgaggacatcacatcgcaagaagcccaaaagaaagagggagagggaggaaggcaggtctccaggacgagcacgatccaagcagcgagcggataagcagagcaggagcaagggcgaaggcggtcggcctcagtacgcgacgcaggcgcttttgcgacacgttaggccggggccaaacgtttttcggtcggagcaactggtgggcgtgcgcaggggaggaagacgtccgctcgggctacgagcggcactctgaggggcgggtctgtcgagtcaccactcgaggccgatcgggccagaaacgtcggcgcagagtgagagaggagcaaagccgctgagagcaagacaggctggtcaggctggcggactgatgagcaagatgggagggcaccgcccattccttgcagcgcgctgcacactcttgaagggtgacttctccaaaatcaccgccgagaaagggcacgccttaacctgagaggcgaggaaggaagagttcagcgagcgctttctctgcagcgtgcgctgtcagaggggagagagaggtcgcgtaccgttgccgcagaaggcccctttgaagacagtcccggagatgtcggccgggcagaacgcgattgagctgtcgacccggcatcgcgggcccgtgtagctgtaggtcgtcgacggagactggccgacaacaggcaaaatcatgacggcggccagggcgaggccgaggaggctaagcggtgagcggagcatggcgagcggcttcggcggcggcggcgactgcgaagtgagtcgatcgagctaggttctcgtaaatgctgacgagctgatgagactgggaggaggtcgagtgcgggaggagctggtcgcaagtcgacaaagggcgagcggctcgtcccccgagctcttcttcctcgccgagcgacgaaacctccttcgtggaaaaggtttgttggtcagggtgagctgctgtgcaagcgagaaagcggagaggaggggtcgaccgaatagcagaagtggtggcgtccgagcgagtcgtcggtttggtcgcccatgaggcgacctgcgacgagcttcgtccttgggctcgagtgtcggctcgagtgcacgcaggaatcagtagctgtcagcttgggcgacgaacgtcctaccaggtcgatggcaaccccgatatggttctgaccttctgggaggtcagcgagggcgggtctgctttcttgccaccgtgcaccggacgaggcaaggttcaggaggctggtccatccagaaacctggctcagcccaggatgtgaagcccgccactacttttacgcaaccctgtccgcggcagtagcagcagaagcagcgccctgagcagctgttggccagctctcgccgtgcggaaccggccgaagacggccatcctgaggtcagcgtcggcactgcgccgggtcgtcgtcttgggcgcgcgacaagaggttcatcgtctggacctctttcctgggccagtgctgacgtcgaacgagcataggcgacggcagccgtgtttgttgccttagctcggagccagtcgtcagcgagcgtagcttccttgggcgagagatcaggtcggccggtcggtggacgtcagaggagagcaagagcgaaaggttgctcgctcgctctcgcccgacctttatctgcacgacagccagagctcctcatctagccctggctcgtcatccgtaccgcaacacagaaccttctcggccggcttgccgacgattctcgtcgagcgcaagcgcgatcggtcgcgagctcgccttggagctgctgcgggcgctgccgctcgagaagacgtgcggaccgagccgtatggagagacggtcaaggcaggcggtccgagcagcgatatgcatggcccgtctgcctttctccttcctcgagtagcatcagacgaagtgagagcgatggggtgctcatcagcagctggtcgggctgccagcccagaccggaagcgcagtcgcttcgcttgctgcccgcgtgtgcccgccccctctctccttcctcctgccatccatcttcctgcaagcacgaccgtctccaccctcgtcctctcgctccgcactgtgccagccacgctcatcaacatcctctcagcgtccggctggcaagagtctgggcgcactcgtccgaccccaccgggccgacgatgaccagcagcccctcttcggctcgaccgtcgcgggctgggcggcctgcccgaccgctctcgcccccaaagatctcggaccgaagccccttcccggatgaggacgagggcgtcggcctcggtcaaatggtcaacaagctccgagacgtcctcggcttccgatcatccagcagcagcaccagcgccagcggaccgaccccagccgcagtcggaggcagctcgacggcgccgggtgcgctcaagccgccagaagcagtccctccaggcacatttcaatctggcagtggcggcaagagtgacggcttgcctggtgcgtagctctggtgcgctgccacactagctgttgagaggctgacagctcgccttgcctggctgccctgccgcacccaaggtccgccaaccatctcgcagggctcgacgctcggccggggacgaccacccgagctgacctctgcctctggccggctcgcttcgacccggctcgtctcttcggccgtgccaccgtcggttgatgcgtcgctccggacgctgcccaggctcatcacgccgtcgggcggccggggcagcacgtttgacgagctcgccggccacgcgccgtcccccttgcggaccaacatcgaggcctcgagctcaccactctcgagccattccggaagcgactcgctcaatgcgacctcgtcgatcgccgacgactcgtcccggctgagaccggcgaccgttcagcacaactcgtcctcccgctcgtcccagctaagccaaaaggcaggcggcgccggcgcccggccggttccctcgctctcggcccgcttcatgcagccctcgtcggccgcccccgtcacttcgatcgagtcggcctcgggccgggcaaccttctctgccgtcgactcgccgcaggcttcgccccagtcgcaagctcgttcgcggcacatgtcgaccggctcgttctcgggtgcgctcggggccaaggtgccgccgttcatgcggccccgccgagggtccaacgcttcagccatctcgtcgacgttccgtaacagcctcggctcgcccagctttggcggtagcggcggcggtggtggcaacctcggcggtcccttcccttggagcagcgacaccggctttacgtcggtcccgggcttcccgctgagcgggccggcggccgactcggacaaccggagcatccggacggccgtttcggtcaagcggagcaagagcgcgagcaaggcaatccgcaagcttgtccagggcgacgtcctctccaaggactactggatggacgacgacacggcgaccgcctgctacgactgcggccgcaagtttacgactttcacccggaagcaccactgccgcatctgcggcagcatcttctgtggccggtgcgcatccaacctcctgcgcgcgagccgtttcggcgccgacgggacgatccgcgtctgcaacctttgcctcgccaatctcgaggaggagtcggacgacgacgaccttcagagcctgagctcgggccggcacccctcggcgccgctaatgcagctcgatggcccgcatacgctgcaccgaacgatctcacagcatcaccatcacggcttccagcatcatcagccgcaatcgccgtcgatggccggctcgccacagacgaccttccacggcctgccgacccccggcggtgacccttactctgacgcgttttacgcctcgcggcctctgacgcccgacgagcgcttcgaggccttcctcagcgggccagacgacggcgaccgctttggcctgctgtcgccctcaatggacgggctcgaggatcaggcaccgctccgtccggcgcctttccggtcgacgatcgcagccgacgacgagctcgacggccctcctccggttcagtccgacacaacgtcgggcgcaatggccgcctggacgagcgacgacctccatccgatccgcttcgctgccgatgtccaacggcccgaccgggcaggtctcgaccgaccgacgctcgacggcacccagtcgcagtcgtacatctcgttcccgacgtcggagggcgacgaagactctggcctcaacacgccttacccttcgagtgttcggaccggccgcttccctcggagcgagtcgcaggcccgcttcgactcgaacgcgccgatcccttcgccactggccggcttccgccagcagagcaagtacggccagtcaaacgcggttctcgatgatcttctccggctcgaagtgcctggaggccggccgcgggcctcctcggtcaggtgcgtgtgccgccaggcccgctccctcccgtctcatcacagctggcgcctgaccaaacccttccgccctcttcgcagcgagccctcgcacgcgatcgcaggccactcactcgctcatttccggcggatcctcaacgagacgatcgcccgggtcggcctcgacgacggcgcccagtgggccgagacgctcgaaaagctcctgacgcaggtgtctgaggccgtccggccaaacgtcaaggctggagacgacatcgacctccggacctacgtcaagctaaagaaggtgcggctcgaggcccgtgtctcttgcgagaccttcgactgacgagtagctcctgctttcatggccgctcaggtccccggcggccggatccaggactccgagttcctcgacggtgtcgccatcaccaagaatgttgcgcacaagcgcatgatgccgaaccgcgtgctcaagaacccgcgggtcatggtgctgacgcttccgctcgagtaccaccgcgtcgagggccagtacgtcgccctgacaccagtcatggcccaggagcgcgactatctgcgcggcctcgtccagcggatcgccgcccagcggccgcacatcgtccttgccagcagcccggtctcgcggctcgcgctcgagggactcctcgcggccaacattgccgttgctcggtcggtcaagccgacggccctcggagccatcatgcgctcgacccaggccgaagacatttcgtcgatggaccggctcgcgctcgagccaaaactcggccgatgcacgacgctccgtctgacgacatttgaccacgagctcattcccggccggcgcaagacactcatgcgctttgaaggctgccacaaggaattcggctgcacgctcgtcctccgtggcggcaatcttgcgacgttgcgcaaggtcaaggaggccgccgactttatggtctacgccgtctagtgcgtcagcggaagcggctcccgtgacgtcggtggccgtcgctgaccccccctcgcttccgacgcctctccagccacctcaagctcgaaatgttcctgtggcacgacgcgtttggcactgcgccgcccgagccgccgcgtctgacgccgcccgaactgcccgacattacgatccggtctgagtacctgaccgacattgatgcgacggtcggcgcggactcgctcggcggcaaagagagctcctcgctccagcaacagcagccatcgctggcgatgctcgccaaccggaagcggctccataatgagcgggcgctctcacggcgcatctttgacacgctcaagccttatcacgaggtgacgctctcgatcagcacgagcgtcgcgatcccgcctccgttcccgctcgccaaaatgtcgcgcctcgacaacacgctccatctcttgcgcgaggcgcgctacgaggaggaggcccgccacatcctccgcgaggagcagaaggcggttctcctcgcaaaggcaagcgttggcgcatccgcaggcgagggggccttagcctcctctcagtcgaagggtctgctgctcgacgacgggccgacgacgccagacctcttctcgccgagtgacagctctgacgccggccaaagcgagctcggcgatacccctccggccatcgctcgcccggtggtcggccgggctggaccgcttccaccgctgccgtcgctcgacagcatgatccactcgccaagagacgtcgcccagatgagcgcgctcgcccagattgagagcgagcatgcgacgcagaccttgctttgggagtggtatcaggctaagtacacgcattcgctcctgccgcaagacaatcagggtgcgtcgcgcctagaagagagtccgcatgcgcccctccttcgctcacgtctctctcgcgcgcctgcaggcatcttctatctcgcggcggagggctgcggcgagcacggtcactgctcgcccccgcagctcaagaaggtcattctgccgtcatcctagtctgcaagttggctgaagctgacccccgaccgcactcgccttctctttctcaggtcgtctactaccaagaggatgaccagacgctcggccaatggatcgaccagaaggccgacggcgcgttccggccgtgcgcctgcggcaagctcaaggtcgaacattatgagcttctcacgcatgcggagacgcggctccagatcgcgatggagcgctgtcctgtgccggtcgaagagggcaagatcgtcggtttacgtctcgctggccactcctcgaactgcgtgctgaccctctctcgatggacagatgacgtggacctattgcctcctctgcgaaaccatctacggcaaggctttcctctcagagcagtcgtggaagctctcttttgtgcgtgctgctgttgctgctgccgctgaaggctgacgaccagaggctgatctgtcaggggcctctgctgctgcgactgtacgccgcagggcaagtacctcgagacgtccttctacccaaacccagatcggacgccgctaccgggctgcccgcacgactttgtgcggtcccacgtccgttacttcatccgccgcaacgtcacgatccgcatccataacgaggctgtcgagaattttgaggtcatcctgccctcgagccggccgtacgttcgggccgagaccaagctccagctcaaaaatgcagagatcacggcctgcttccaggcgtccaacgtctactttgacagtgttgtccgcaagctcaacgtcctcgatggcggcgtcaccgacccgacccggctcaacgacctccggctcaagctggcgacgctgctcgacgagatcgattcggagcggcgatcctttctcggcagcctttctaagagcgcgcgagaggtgcgaccgttgccgtagctgtcgacagaactgcctgctgctgacgttttctgtctgtttgccccgtcagacgtcgcccatggacgttctcgccgtcaatccggtgctcaaccagctccaggagatcgtcgtccgctgggatgacaagctcgccgagtgcgtttcctcactctgccaaatgcttctctcagtcattggctaaccgtgtatttttttttgccctcttaaggctcgaaaagtcgttcttcccgaccgagaaggacgtccggcggatcgccgagagccggatccggcgcatgtttgccggtcacgagagcctcggctcggatcgagcgagctcgtcgatgcggagcgcgacggtctccgaggttgatgagagcgagagccaggccgagacagagagcgactcgtgcagcagcagcacgcgcgacgccgagagctggcttggagagacgtccatccggttgacgagcatgacgccgtcgccgggccagatcgagctgccgtcctcctcgacgctgctgaacgagtcgccgacgcacgtctcgccacagtcggcggtcctaccggcgatggccggcctcagcgactcgacgacgcccatgaacaccggcttccgtctgccacgaccgacggacgacggcgagtcgtactttccgccgagcatcccggcagagagttccctacaacaagagctggccgaaaccgagccgttgtctgatggcgaggctgactcgaccaacgacagcgactcgaccatctcggccgtgccgacgtcgctcaagccgctgtcggtcctgtcaacggcgatgaccggcctaacgccccacgacgaggaggcagccaagagtccggacgagccttcgccgccggggccctctcggatcccgcgtaagattgccaggacgtcgtccaaggttgcgacgctcatccagcgctttcagcggcgcgagggtgacgagcagttcggcgacgacgaggaagaggaccaaaatgacctcgacgcctaccggtcggccttcaagtcgatcgcagtccctcgccaagcggatgccctcaccgagagcgagcaggaggccgaggccttgcctcgaccccggatccgccggggcgtcactgacggcggctcgcgcaagaagcggctctcggccggacgtagcctctctgagcaaggaaagccgagggatgagtcgtctcgcttgccggtgccaacgaagccctggctgccctcgcctccagctgccactgcggacgactcgcaggcgccgagcagcccagaagtcttaaccggcggctttgaggtcgacccggaccgtctagcggtgccgcccttagccgccaacggcagttgcatcacgcgcaagtcggacgacatggcgtcctcgagctcgcccggaccctcgcggacccatggccgagtcaagccgcgaatggcgggcaagagcggtggcgtgacgtcctcgccagccgctcaggcccgccagcgcggcaacagcggcaacacgagagtctcgaccatcacgcgccactttgtgcgtgcttcccttctcgccgcctccatcgactgagctgaccgaagatctgtcccgccaggaccggctgagccgcgaggccgagcgcgaccgcctgaagcgcctctcgctcgctcggggccgtcgcgcacggcccgttaccgtggccaaggcggtcgtgacctcgctcgatctgcgtgatgccgtcaaggacgagtcggacggcaccgtctccgaggccgatgacgaagaggaagacgctcggtcgccgtccaaggcccagcagggcaagcggccgcggcacacgtcgccctcctcgccgacgacctcgcccctggctctgaagagggccctcccaatcgcgcacccgcttcaggggccagacggcacggagggcttgccctcctcgctgtcgacgacgccaccctatgacgtcggagcgccggccagcaccaagccggcttcaacgtcaccaaaggcgctccaggactcagtccagctcgatctcgggccctttgccaagatcgcacccctcgcgagcgtgccgccgacaccgctgctgacgggcggctcgtcgagtacgtcgcagtctggcggcgcccggaccggcggcggcggccacatgtcggagagcgagatgagctcggccggcccggagcggagctcaattctcaagacgctctcgtcgctctgggccttttcagatgccgacctcgcgccgctcgagtatcctctcaacgcgaacacccacctgtttgagggatcgcgcgtcatcatgcgcgaggaggagccgctcagtgtcattgcctttgcgctcgactccccgacctacaaggaaaagctcaaggcgacgcgggcgacggcgctcgccctctcgccgctgtcgtcgacccgatcggctgacgacaaggctgaggtcagtcaggactggacgcttgttggccacggcgatgcgcaggagcatgaagactccgcgctcgacggcgagggcaaccatctccaatactgtgcgtcagccaccgctcagtcgcgcgacagagtcttgtgcgcgcgctttcgctgacgggccgcgccctcttttgttccacagcgatcagcgccggcggaaccgccttcttttgccggctcctcttcctcgagcgcttcgacaacctccgccaccgctgcggcctctcgggcgccaacggcttcatcgagtcgcttgctcgctgcgtcaaatgggaaagttccggcggcaagagcaagtctgccttcctcaagacaaaaggtgccgtcccaagccaacggccgagccggcgatcgcaactagctgacttgaccctcctctggcagacgaccgcttcgtcgccaaagagctcagccgccaggagatggacgacttttctcgctttgcgccggcctactttacctacatggccgactgtctcgacaacgaggtccgtccggggagaatccgaacgcgtccgccgactgccgctgaccctcgccccttctccctttctagcgcccaaccgcgctggccaagatctttggcgtctataaaatgggctacacgagcagccggggagccctgcgcatgaacggtgagtctgtttgcttctctccgacagtcgtcgcgccagtgctgactttggcccccgtcgcccgacccaccagtcatgattatggtcagacccgtctcgacctcaccaacccccgcagagactgacgttgtgctcgcttcggcccgcaggagaaccttttctacgacaagcgcttccaggtgatctacgacctcaagggcaatcagcgtgggcgtcatatcgagccgtcgggcaaagccggcgaggtcctgctcgacgccaacctcgagaagagttcgtttttctttcgccccgacgcatcgtcacagacgctgaccacgctgccccgcctcaacagcactttggaatcaccctctctacctgcgcgactacagcaaaaagatcctccgttcggccctccacaacgacagtgcgtgcccgcacttctgccctgctgcgcctcatcccctgacttgcccggcctgcacctcctcgcagccaagtttctctcggagcagggcgtcatggattacagcgtcgtctgcgccgtcgaccagcatcagagcgagatcacggccggcatcatcgactacatccgcaccttcacttgggacaagaaggtacgagacgctagagcagctgcgcttgccgcccctccgctgacgcccccttccttttcctctgcagctcgagagctgggttaaggactcggccttcttccccagcaagggcgtcggcgagccgacgatcgtagggccaaagcagtacaagaacgtaggttacgccttacgggtgcagttctttgccgttgttcgctgacttgcaatccttgaccttgctacgcagcgctttcgggcgagcatggaaaaatacctgacggtcgtgcgtcctccaagcagtgctctgcctcgcccgctgcctgctgacgcccttagccccctctctctagatccccgacttctggatgcacccggagcaccccgaagtgacggatgacgctgtgcccggcgaccacgccgaggccattcctccgccggacgttcccaggcaaggggtacatgcgatttgaccgaatcttatcggatcaacacgaaactttgcctggctggtcgctcaggaccggtgaagatacaggaaactagtctgccggcgatccggtcacagggccggccggaaaaggtcgggaggggggtccggggatcccgcccctgcgcgggccgaaaacgttttgtcgagatcttaccagatcgctacgagactggtaccgctgggttcctacaactcaggagaggctgcctaaacttgtttggaggcgatccaatcagatggtggccggctagccaaagggggggggggtgagcgcgcgcgggtcccgaggcgcaagtcgctgggctgctgcgcccgcctgcttcgccatgccgcccgcccccttcctgcctatcgacgaccaccatcgatcctgagagcagtaaaagtgtcaagagggtcagtcctgtccgtgctgtcgtcatgggtcgttgtcgaggtcgacagggaaacgggatcgccggcgctgacctgttccccccgctgccatcggttctcctcgcagatttccctgccatccctcgcctcgtccttcttgacggtcatccaggtcttctaggacggactcagtgacagcctcgcacgttgctcgctctccatctctgacttttggcccgtcgcccgcgcctctcccgccgtcgtctgccgctctcgcacggccgcccgccctccctctcgaagccagcagaaacgcgcttgcgccacattcccgctgaaactcgctctgatacttcatgtcatgctcgcaccgatccaaatgccaagacgcgctgcgagagggccgcccagccgacgccgaggccgcgatagaagagggcgttgacctgctcggccgagagcgtcggcagctcttgcacggccgggtcgtcggtcggcacgaggccggtcgagacgtacgtcaggccctcggcggccggtaagaggtcgagctgggaggatgggatgccggagacgacgactgatgtgcctgcactgctgcaggcgagtgaggcggcggcggttgagaggatcgtgtgccggcggtcccacgggttgagagagagcccgggcgttgtccgcgaggggacggccagcggtgcgaagtgcagctcgaggtgtttggctgccgtccctggaccagtgacgaaggtcggcagcgggtggtagcgcggccggacagaatggaagaagaccctgtcgaacgaccagcggctgggcgtcgtctgccgaagcggcgcgaggagtgctgccagcgccgcatgttgcctcggctggaggtggacgtgcgtctcgcccagctcggcctcgccagaggccgccagaacgaccgtcggcgctcgaaggacctcgatgagcgtcggaccgacgacaggcggtgactgctcgtggatgagctcaacgccttcgacctctggcggccgcgagcgggccgactcgatcagcggcgttacgagctgtgtccagcctttgaggttgtacgagagcctgaggacacgtaggcgaggtagcacgacgccgtccgacgggctgagatgggcgagcgcccgacgaaggtgggcaagcgagacgtgctcctccgggattgcagagagggtaagctcgcggacccaacggagagcgtcgagcttacgcgaccggctctgcggcccattacagtagaagagggcgatgacatcggccgaggttatgagccgaggcgaatggtagagaacggcaagcgacgaccggtaccaagcgctcgagacggcgaggcagtcgaggagcgtcggtgggtcgaggtgctggaggacgaggtcgagcagaggtgcggtcgtccagaggcggtgtgattcaccagccggtgccgatgtcgaccgactgctcggaggagccttgatcaagaggggcatgacgctcggcaggtcctgcgatggtgtgagggttgagggggaggagcagacgagcgcaggcgcacgaggctgactgccctgctgggcctcgggagcaagcacgccaccttcctccctcttcgtgatcaatcagcctgatagtcgggatacgattatcagtatgctcctctcaaccgaccccactttcctctccaaaagagagagggccagcgtcgctgcagctgccggtcccagcatgaacggctctgggcgcgcagcgacggcgatcgccgcctctcctccctgcgcccttccgaaccagtcgacttcgtccagctttccagcctttctccaataccgagcccttctcagaaacctcaacctatcccttggataccccttgagatggactatcgcttcgggagctcacccgagccttccgagccagatgatccgcggcggccgcgtccagacttcagcccggtcgatgccttcaagcagctcgtccagatcccgacctacacgtctgctgccttcctcgaccctgttgacatcgatggggaatccgattcagtagctcagtatcgctgtgagtctcctgtcgcgctgtgcggaggagcgcggctggagaggtcggccagcgtctgacttctgtcctgactggccttgcacccgtcccagtcctccatctcggcttgtcctgcaaggtcctccatcgcgaggccaagatcagcctcacgcaagactattctctcctcaagttccccggctctcgcagccgagtcaacccgcttgtccggctgccgcagcaggagctgccggccggccacaccgagttctttgcgcccggcggccatctcaagggcgtgctcgtcactcgcgacaaggagcgctacatcgaggtctgggacctcgcgaggcagtcactcctggtcggtaagaaggttaccaaagaggttggccgctttatcgccgacggtcagtcttccacagcccgcttcctttggagctcgcgctcggctgacgtgagagtgcgctccgatccttgacgagcagagcaatggggccagcccgtcttctcgccaaactcgcagaagctcctctttgttgcttatcctcccccagacgaccctgccgagccggccaagtcggcactgaagcgcttccgcttcacgccgacctggggcgagctccaacgcgacctgacgtcgcccgaagtcttcctctttgactttacaaagccgtcggctccgactgtccggcctcttctcaccaagaagcagcaaggtgaacgctcctttggccaggcgcagtttggccggggcgacggcggcgagggagtcgtctgcgtcggctttgagccgatggaggacgaacgacggctcggcgtagtatactgtaccaaccggcggtcgagcctctggtggttcccgctagcggccgacgagcaggaagggacgcagctgacgcccgaatcgaggtcggcacgctcccctcgcgtcctctcgcggcgcgatgcgcccggcgtcgacacgctcgtctggctgtcgaaccctctcggagggcctcacaactcgtgcgcgacgctgcactgcgcgccactcaaggcctcgtgcccaccggagacggacatcctcatcgacgtcgtcgaggagcctgactatgaggccgcggaggagtcagtcttcccgggcctctacctcaacgctctcccgtcccagccgttcctcttctggagcggccgccaccggctcgcgctctcttctatccgcttctcccaccttgcgctgtacgtcgtcgacatcccgggcgtcggcgagcccgtcgtcccatccaagcctctctaccggaacaaaggcgagcacagcgacgtcgtcctcggcacggatggccgagtgctcgttgccgtggccagcagcaacctcgtcgcgtcttccggcctcgaagttctcaacgtcggcccttatgacgccgaatccgagcactgctggcacgttaagacgttgatgtcggatgacggtccgcttttgctggcaaggcaggaggtcgcgaggtttcagagctgataattcatcatgtcgcccttcacgcaacagctgccgacctgctctgccgttatgttccgcgcatgacgtcgctcccgaacgagcgccatgtccagacgcttagcctgcatcgcacctccctcgacttcttcgacgacgactcggcgcgcaagctcctcctcgtcccccacggcggaccccattcgacttcgctcaacagcttctcgcccgccatcgcagctttcgctcttgccggctacgaggttgccctcgtcaactatactggctcgctcggctttggccagaagtgggtcgaccagctcgtcggcgagtgcggcgtgcgcgacgtcgccgactgctgggcggtcatcgaagcctggaaggccaagctcaggcccaggcagacgggcaaggtgtgagtcgctcctagcgagccctcggcctgtggtcgtttgagatgaccgagcggtgtactttccctcagctttgtcctcggcggctcgcacggtggctacctggcggcccatttgacgagtcagtatccagaggccttcaccgcagccgtcctccgcaacccggtcgtctcgcttggtgagaatttgatcgtcacagacatccccgactggtgcgcaacgttcgaacatctgctcgcttcgattccgcttttaagactagcttcctgtcgtcggcagggtcctcaacgagctcggtctgtcgtaccccctcgagtcgaccgtccagcggccttcgatcacgccgacggcggagcagtacgcgttcctccaatcgcggtcgccgatcgggcaggcccaggccgtcaccgcgcacacgctcgtccttatgggcgagggcgaccgccgagtgccgccgtcgcagtcaaaggtgcgattcctggccacgagacgcctagccccggcctctgactgacttcatcttcccctccctcctcaaggcctggtaccacagcctcaagggaaagagcgcctgggcggccaagaccggcggctcccggcttgacgtcgagtgcctcgccttccccagcgaagggcacgcgctcgacggcgtcgtcgccgagctcgcctgcttcgaggcgacgcttgaatggttcgagcggcatgctggcgacgggcagtaggatccgttctcatgcgctggccggagcgcaagcgcgctcaatcatgcccttctcagggccaagccgcagcggcggtgacaagtctagcctttgcccaggccgcagccgcagggtcactcgaggagacacagatggcggcggcccatcagaagagggcaagctccagtcatatgcccttcccctcacatcactggagcccttcgatggccggaagacgtgagattacatgcagattgcagggtacaaggaccaaaccgaggagcagagcaagagtacaaggaccgagcgatgaaaaaaggcagagcgcgcaacgaccgatcaatggccgccgtagcctccttgatggcctgagccgccatggtagccaccctggccgtatcctccgccgccgccgtatccgccctggccgtggtgctgctgctgcttgccgccgctcatgagacctgtcgaaagagagagtcagcaagagggcagcttgcgaacagaagtagaccagaccgggaccgacctccgagcatgccgccgaggccaccgccgccagagccgccaccatgatgcttgcctccgcccatcaggcttccgatgagagcgccagcgccgcctcccatgccgccgcctcctccaccgtgatgctggccgccgtgcttgcctccgcccatcagactgccaatgagggcgccagcgccgccgcccatgccgcccataccgcccataccgccccctccaccatggctgccgccgtagcctccgcttcctccgtagccgccgccgtgtgacgatttgccgccgttgagcagcttgccggcgacagtcgcaagcatggcgccagctccgacgcccatcgccacctgtcgatcaagaaggaatgcgtcagcccagcatagaaagacagcacaggaagattgtctggcgactagccttgccaaagccgcgatctgtcgtcgtcgtctcagtcttctgggcgttggcgtagaagagttgctggccctgagcgtttacgcccggctggccctgctgctgcggctgagagccatagaaggaggcggcagctccgcccgactgctggtgctgctggccgttgctgctgtacgagttcggctgctggccgccatacgagttgtgatgctgctgctgctggccaccaccctgctggccataggcatcgccctggtaaggcgtcggcccaggcggcgtgtgatcgtacgacggctgcgggtgggcatcatagccgccggccgactgctggctggcgtcgtactgcgagctgtactgctgctgcggtgcttgaggctggtcgaacgacggaccgctgggcccgcccgggtttgggtgcgtccaggtcggcgtcgggttgggtgccgtcgtgtcgacatagtagtacgtagagtgctcggccgaccactcgcggatcctgcgaggggcgggaagggaaagcaaggagaggcaggagaggtgcttggggtaagcagcagatcgagtgcagcaggcgatggatgagcaaacggaccagccaggagggagaggagcttcttgggcgttcatgatctcgaaagagcgattagaggtagcttgaggtggtggcggttgcagggcgaggtgcaagcgagagagatgggccaacgtctcaacagctccctccgaaggcggtgcaacgggtttctgggggcccgcacgcgcagtcggcggccgacccatgcgagagacgaggacgagacgagaggctcagacttcgacgtcgacgcatgcgttcatatgtacatcatcccctctccgcttgccacctagaacgcgactgcagcaagcgcgccgagaccagcagcgatggcgaccactggccagccggtcgaagggaccgccgagcgcaggccgctcgaaacgaccgaggccgcgttgtatgggagccggaggctggcgccgtgaagaagcgagggcagaggcagtcagtatttgcgtgaaattggacgcacgcgagagagacgtacgttgactgactgcataggcacagatgagcgccggcggctggtcagctctcggtcattgtcgagaggcgtcttcacctctctcgagacttacttgcacgccttggatgactcctgaatgaggtccgccgtgaagtagtgcgcaaagacggccggcgcaccgagcgtgtcgttgccggcgaagtccgcgacttggaccaagctgcaagacgggcgagagagtggcacagtcggctgtcagcctgtgaacacacgcgcttggctgcggaagaagagtagacggactagtagcggccggctgggacgtcgacgacccatttgaaccgcgtcccgttgacacccgtcgccgcgacgtagagctaattccgcaagcacagatcagctattggctcgcacggcgcggcagcgcaaggaccgggcatctcacaggcgggttcgcggtcgcgttcggcccgatcggtgccagtaggggcggcgtgacgtcgtagaccaggaccgtgaggttggtgttgccgctctcggggtagagcgccggcgggcggtctgaccagtcctaaaaggcagggcaggggcacgagctgctcagcacggcgtgagctcgggcggacgcggcgacaagaacaagaccgacaaaggtcactggctcgcagtagtaatgcttatcatcgctggcggcgactagagcctcagcggcggaccgaatgacagggcagggggggatcaatgccgtccctgggccggcgtcgaacgcctaacgctgaggctctcaccagtgatggggctagagataatgaccgtgtcgcggcgcggagcgagctgcacgttagacagcgatgcagcgccggcgagctggacggccgaagcgagcagagtggcagagccaaggaggacgagcgagagctgcatggctgagagctgagggttgagacgggcgaggactgcggtcgaggcggtggttgagcaggcggatggccgagagcaagggcaagatgcaggcaggtcgcaagaaggcgaaagcaggcgtaagagatagtggtgatcagccgcaaaggagacctgctgcccttttgtagatgggttgcctagcgagcgatcacgcccaccgcgtccgagctggtctcgcgtgggcgtggcctgggagccggagccggtcgttccgtcggccgacgaggtcgccctgttgccctcgtattcattgtcgtcatgagcagcaaagacagacgggaaagcaatcagcgagagagttcgcgtcgtcgcggtcgtcgaccagaggtcagcgcaaggtccggaggagcgaatacgaggtgccgatcggaggcagattggtcagcacgaccagcacccgccgccgacgccgacgaccttagaccagccagcagcagcagcagcagcctgctccgtgccatcctcatcgacctctctccattcatcagcagacacctcgaccagaccaactgccgtccttcttgctgcctccatgtccgcctccgccgccagcacgtccgaccccggctccagcagcaaaagcagcgagctcggcccgctcgtccctgacgagcccaacccgacgctgccgcccccgcgcgcaccgctgacgctcggcaacctctgggcggctgtcaaggtccgtgcttctgctctctggcgggtcacggcgggcttccgatcgtgctcgatccgatacgactcaagaagttcctgttccgctgccttgcgactgacgactttgactcgctccactcgcccgctcccgactctagatgacgcgcctcgaggacctctcgccctcccggctcagcgagattccgtgcatgcgccagtcgctcctccagggcatcgccggcggcaccggtttcgctgtcctccgtctgctgtcaggcaagcccggtacgtcttgtactgcacttgctgctgctgccgatcggcgactcgcctcaactgctcctcggggtggacccgtgatgagaaacacaatatgtgttctttcctatccgtgcgcctcgccgacccggtccctgcattctctccggaggcaggtttagcgggcggcgatgagcggcgcgggactgaggaagtcgtattaatcttctctctgatgtccaaccagcgtgaccacgtcgctttcggcagcagccgttctcgttgaccttgtgggcgctggctgactgaccatgagctcgcattcgtcggctttgtaggcttccggacagccggctctgcggctggctggttcgtcggcggcttcatcatagtcggcggcgcagcaaagtacgtcccttccgctccaacgttggccgtctctgagcccgatcattgaacgtcgctccattcgtgcgctagcacctactgccatcagaagcgccaggaagagatcgagatgatgcgactcgtccagcagcgctacccagagcgcaacattgtcaccgccggccggcgcgcaaaggcgctttacgacgaagaggaggctcggcgcgcgcagggcggcgcgccgagggccgagccgatcgtcgaccctgcgctcggccagagggtcaacttccagaaggcgccgagggtcgaggtcagccagccgggctttgtcgaggtccgagatgtcgacggcgagtttgtcggccggatgtcgcctgccagtgcgttccttcctctacttcttcagcgcgcacgagtctgaccgactcaaacttctcaccttctctcagtggccgagctcgccaagtcaagaggcgcaagcgagacgtttacagcggtctcaaagccgtcgactcctcccccagcgccttccgaccggcggggcatctttgaggctgtctctgagcgatgataatggccgcttgtcttttcaataaaagatagatagcacgggcaagaatcgatacagtgagggaaagcacgggcgagtcgacggtctactgagggacgtcgataaagaccttgccctgggcgcgctccgacatcacgcggtcaaaggcggcgaggacgccagccttgtcaaacttgtggaccgagtcgacctcgaccttgatcgtcccgtcgacggcccacttggccaggtcgggcaatccggcgcaagaatccatgagccagaactggaagaccctcgggacgcctccgagaagcttcggaaggagtgcggacgtcgcaagcgacgtagcccaagcggcaaggctgaagacgcccttcggaggctggccgccgatcaggatgtacttgccgccttcgacgaggtactgctcgctgttgccgtagaggtcggccttgttgccgatcaggtcgacgatgagatcgaccggcttcgagccgtggtgctcggagagccaggccgggagctcgttgctcttgtagtcgacgatctagagcgatcacgggatcagtcttgggctggcacaacggaagcgtgtgagcgagacgcacctcgtctgcgccgagcgacttgcaagtctctgcgctcgccgacgagcacgagacgatgacggtagcccccacatgttttgcgatgccgatcgcgatgcggccgacgctcgtcgcgccgccgttgataaagaccgtctggccggccttgaggtcaccctgtttgaggatcgcaccgtgggcggtgcagccgacgagagggaggccagcggcgtcctcccagctgagctcggtcggcttctgggcgaggtcctcctccttgacgacggcgtactgcgcgagggcaccacggcccgtcttcatgttgagggcggcggggatgctaggagataacaagagacagggaagagagagatagagggataggctcgtgtcagttgggcgaaggcatctcgaagaggctcctcgacgcacatgccaaaaacctcgtctccggccttgaagttggccgactggctcgtaacgacgacgcccgagaggtcgtactcgacgacgttcgggatcttacgaacgaggcccggaaatttcattgacttatgaccaacagggttgagactcgttctcttgaccttgacgaggatctccttatcgccgacggctgggaccgggtgctgttcggcgagctccaggacatccttgggcaggccgcgagccgtctggagccaggcttgcatcgtctgagggattgcggtcgacatggtgagggtaagagagggcggaggggggcgtgtgagggaggggaggccggaactgagggagcttgagcgaggaagctggcgaaggaagagaagagggagggatgagctgatgggagtggatggtcgagagaaggaggagcgacgaggctgcggagatgcgtcagtccaatttcgcctccgaaatgcctccgatccggtgacgcggccttgtctcgtgcgtccgggcatcttgcgagttcgctcgggcatcgtcgcgaggctgggtgcagggcgcgagagcatgtatcttcttttgcgcgcagggccgacttaagagttgttatgggagtaaacgaggttcaaggtatgagagcgaggggggggggaggagcaagggtaggccgaacgagtgtacagacagcagatcaacaggacacgacgtgcagaggaagagaaagactgggaggcgtcaagagggagaaagagatgagggagccgctcaccgcccgggcggcatgccgacgccgccgacttcctgcggcgccatcagcggcatcttccactctagaccggccgcttccagtcggccgcggccaatgtcgacgatgggaccgagagcgatcgcctcggcgccgttgccagcgccgccaaaaatgaggttagccgaatcggccgagtggacgctcggcgagggcgagtggttcgcagaacgatccgaatgggcgccgctgctgctgcggacgacgccgctgccggcagctggcgagcccgcgcgcttgccccaggcgacgttggacgaggccgagttgccccgcgagtggctgagcagcttgggcgttgagcctttcgtgaagtggatcgagagcgtgaccgggtcgagcaggttgggcgcggccggcgtcgacgagcgcgacggcccctgatcaggcgtcggaaaccgatgcattgactttgacgaggccgacgaggcggccgagggcgatggcaggaaatttggcacgtgggccggcggcgaggggaaagcaaagagcggcagaggtgacgttcgcggcacgtcatggtcctcctcgagcggcacttcgtcgtgcgacatggccgaccgtggcgtcgtcggttccgaggcctcgtagccgtcggccgagtcgtccccgccgggcgagacgcgcaagccactcatgggcgtcgacaggccgtcaagcgcgacgccgatgtcgtggccgttgagggcgcgcgcgttgagcgtcgacctccgccggttgtccggcgtcgtcggcccgtcctcagcatccgagtcgaggttgacctcctggatcggctcgtgcttggcttcctgagcctcgcggaacagcctgcccttccgacgctcctcccgccaggcccgcatccgatcgagctcgccgtctcgctgtgcccgccatgcgccgggcagcggctttgagctcggtccggcagccataccggcctcaacctcgagcccgagcgcgaagttgccgcggtgattgcgccggctgtctgggttgaggatgccggcgtagccaagcgcaaccttgatcgggttgtggccacgcgtattggacattcggtgaacgtacgagatgttgcggccgggaccgcagacgaactcgccgcctgtgtgacgggtagaagggtagtgtcagcatgaggcttcagatttcagaatgtcgtccgactgaccgagctgcgtgaagtgcccgggctggagggtgatgcccttccggcccatcttgccgatgttttgtgcgacaaagagtccgccgcctagtgctgagtgcttgacgtattcgcccttttcgtcttcggtcccgccgtcgcccgtctggcgcgtcatgcccatcgctcgatacagcctggtgcattgaggagcaaagggtcagaacgggtgtcatgagagattcctagagtctccgcgacgcactcgagggtcgggtcggtgtagattgggaacgggcacttgaatgccttgccctgatagctgtggatgacggccggcgcgccgtttccgataatgatgactgcggccgagcgaaaacacgttgtcagctgtcagttgaaagtaggcggactgaagcgtggcacgtcgcggccgcacgtttggcgccggcgcgcttgacggcctctgggtcgacgtcctggacgatcgagtggacgtagtctgaaattgcgagagcaggagcatcagcgacggtgcccgaggcctgtgcggatccggcagacgcaagctgtcgaacgcaccttgacacagcgggcagtaccagtgccgaatgaagacgaccaccgtcttctggtccttgatgaggtcgccaaacgcccacgacttgccgtcgccgtcgagcacctcaaagagcgaggcctcgaacatctcgagcgaggtcgggaagctaatgagaggcaggcagagcggcagtggaggccgtcagctgatgagcttcagggcgcagctggctcccgccagagcgatacaggcgaaaagggcatctcaagaggacgtacgcatccgtgtcgaaaagctcctcctcggccttgacccgctcagccttctccttgcgcgactccttgcggccgcgcatgagcatcgacgccttctcgctgatgccggccttgcgccggtcgcgccgctcaaacgcctcgagctcctccgtcaggtcccaggtcgacgtcggaggccggatgccgcagatggaaggaccacctccgccggtcggcgagcacgaggacatattgagagctgggcgaatgtgtgtgtgtttggccggactgaggagagttggtgtcggctgacgatggaggaagccgagcaggtgagccagaaggtgaacgtccgtcgttgaacgacgaccgagcgagacgagcggctttgggagtcgcggcgaatgggtcctgaacaggcgacgagtgggcgcgcgacgatcctcggtcgcctcgtcgctagggcgggggcggacgggtggaaggggagagaggtggcggtcgcaatagacgggctgaaacgagggtggccgatgaagagaggggcaagggccgccgcggatgacgatgcggaggacgcgcgtggatcgccgagctggctgttgttgccgaggtgttggagaggcggatggatgcgaaagctgcgacacacacgagtcggtcggggcgggcgaaaggcagaggttgcgcgaacagagcgaggtgagagccggctgggggtggctgagagtgcttgctgccggccggagcgcttgttgaaccagacgagcgggtcgaggggcgggaaggggcgcggatgtggtcggtggagaggactgtcgacggatggtctgccctcagagatgcttgctgactgaaggaggaagagggagcgagcagacgaggccggttcgggctcgagcaagggcagagcggctagcgcagaaggttgcttatggtctctcctgcaacgagggccggcgtgtgctgcaggagcgacagcggacgacggtgtcttagttgcggccctggaaccttgattggctgatcgctcacctcagcccgcccgccgccagggccgaattcccgagccgagtgcgggcagcctgggtcggaggccgacggctgcctcgccgccgcagccagccagggccagccattggtctcgtcagcactgagagacgggtccgctcctctggctcgacgcgtcctattcgacacgcacgccctcgtcccgtgcccggcgctgatcccgacgtggaggcagagagactcgtgtcaggctgccgccgagcggctcccgactctgggcggtcgacggacgtcgctgccggtctggcaccgcaggctatggcaacggcgtgcccagccttttgccctccgacctcgatcagcttgcggctgcggcccagccgtcttggctcactttcggagccggcgctctcgcggttcgggtcagtagaggctcctgcgttggtggccgttagaaggaaggagcaagcgacctccccttgatccctcttcctgtcgaccgccgctgctgatgctgcgcagccggccacgctcgtcgaccccccctctctcatcgtcgctcacctgccacctcgaccctcactgctgccagcacccgcaagaaagtcctagctcgccagcaagcagcacgcacctcacactctgccctcgtccgccgcctcatgacgaccacgcacatcctcccaagacatgacacgtttcagagcgacgacaccttcagcgtgtcgctctacgttcgtgatctcgacccggccgacgtcgccgtcgccttccgcgagcgctcggtacgttctgctcgcgctgaaatggctcatcgccttgggcatggctggcgtgtatgagctgtcgacctcgaactgacgctgtcccttatatcctcgcccggcccagatcaagctgtacctgcccggcggggagtacgaggtcagcccgctcgcgcacgagatagacccgaaggcgtcgacctaccgcgtcctcaagcccaagctcgagctctgcctccgcaagaagcacgtcggcctcaagtggaaccacctcgagggcgaagaggaagagctccgtgcgtcaccgtgtcgctcggtcgctcgaacctccccggagctgaccaacgtcctcgccctgctcgacagcgatgtcggcgccgcactcaaaggaggagacgacgccggccgtcgcccgccagaccaaggactggtccaaaatctcgactgaggctctcaaggaggtcgaggccggagaagtgcgtcctcggccccctattccgatgcaaggcctccttcgctgacctgactcttcgcctcctcttgcttcactacaggccaacccagatgccaacactgcgttcaagcatctttatgcgaacgccgacgagtcggcccgccgcgcgatgaacaagtcgtattcggagtctgccggtccgtctgagcaagtgctctgccagcgttggctgccgacaaggctgaccggcactccctgctcttatcgctcgccgtaggtacgaccctttcgatgaactgggaggacgttggctcgaagcggacccagtttgccccgccgacttaacggggggcaggccagaggcgtcgagctgtggccggcgacgccaatctgcagccgccggcaacacgcccaacgccagcagtcgtccacgtcgcatcatgcccttccttcttctcttcctctgtcaccgggtccactgctcggctgaccttacgcaatcttcatgtccgatctccttctctctgtggcggtgacgtgagcttctgcacgcttctccgacgcgcaatcaccggcatcgctagtcgaccactttatcactcgatgggctacccggcccggcgcccgaatgctcgcgccgctcgctgcccttctcctccaatagtcgcaggcccgcattgcacacttcggccgagacctggcaaaggttgcggcggtcgcttgagtcatgtgagtaggactgctgaccttccttcttcccttccccactgtggccgcctctctctgactcttctcactctggtccattgtagcctgcctaaccctgccgacccggccctctttgcctcgcaatcaccatggcatcgtcgagtcttccatcatcccgtcctacggcgagcgagagcgggacgtctgaaggcaaggcacttgaggttctgcgagacgacgcacacgacgagagcgagcctggcctggctttgtttgcgcggcctctcgctcgcctgcttctctcaaacaccctcgcctcattgcaagcttgcggccgtcgtcgagcagtctgatacaacaggtccatccatcatcgctcactcggccggcccttcccttgccggcgcaccctcaggtaagagcgccgtccgttcgtccggcgccgctgccagccccggcccgacgagcggccggccaaagtcgtcgatgccgagccttgcctgcctgctcttccaggcgatacacattgccagcagaccagcctgaaggacgccggtgaccgcataggggaaccaggctgggcggaagaggaaggaagcggagggggtcagcccagggcggccggcagataaggtccagagcacacacaagaccacgtcgtgccctcgcggatcgcaatcgagacgacgaatgcgacgctcccaggcacctggatcgccatcgtcgggatcgagagcgcgccgacgaagccctcggaccaggtgagcgcaatctgcgggccgtactggaggacggcgagcgccgtcgcggcgaggcccatcctggcaggcgcgacgcacagctgggtcagcaggcgcaggcacgcaagtggcaacagacagggcgactcacgtatcggccagccggctgagcgtcggcgctggcggagaggtcggcaggggttgaggcagcgggaagcgcatgttgaggaagaggacgagcgcaaggccgacgacgctggaagagggcggcaaggaaggtcaggcgagatgcgctggcgaccgagcagacgtgtctctgcccgacgcacaagtggacggcggtcagggcggccaggctgactgacagccgccagagccgtgtggtcggtcggcgggctttaggaacaccgtcgtcggctgcctgcacgccgccgacaccgccgtctgcccacttgagatgctgcggaaagaagtagaggaagagcgggaagctgccgtcgaaggagagcgagagaggtggcgagatcagccgggcgcgaagaaatgaagcgacagggacgagacgcacatcgccgcaaagagcagccactgcagtacgacctggatgaggccgagcagggccatcaggcacgagccggccgactgcaggcgggtgagaggaatgctggtcagcgagcgcttccacaggtgagcaggtcagttggacgcacgacgacctcgcagcatcgaaccagcggccactggaggacggccatgttgaacagtgccgaggccgaggacgtcgctccgagcaagaggtaccaagggctcagaccctcggatgagcccgtctggatcagccgtagatgctgcggcaggtaggacccgacgaggccgacaatgagcgccgacgagaggatgagggcgagcagattgggcgcctggccggaacggaaagggagggaggcgcagcgagcgatggagagtcagcccgacggtcagggtcagccagcgagacaggcaagcccgaccgacgcaccggctcgcagacggccggcggatagggcagcatgctggtgacgctgcctagcgaaggcgatgctgagagagagagaggcctgcgatggtccggcagacgaggtcgacgtcggcaggcaaggctggagggacgacagcagctcgctcggctcccccttcgacgtccacctcgtccctggcctgccgctcgcctcggctcctgcctacacccctagctcacgtcagagtccacccatcaggagcagagagagcggtccagcatgacccagccggcccttctaacgacgctcgaggtcggcggctggacgctcgcgctctcatcaggcccgtcgccgcggtcgcgactcgcgctctcgcaggtcgacttcgaccgttcgtcggcttccgtctcggcttcgatcaaggtcgtccctgttaagacctgttgcgcaagttctgcaaccctcggccggccggtaagcactacgagctcgagttggcggctggctggctggccggctggctcttgctcgaccgacaggccgcgcgcagtcgtcagacccgccgagccagcaggcgtcgagccagccggccaagtcatcctccggagcaagcaaggctgtcgacctctggctcgatgaagctggtgcagcgcgcatggtcgctctgggctcggcaaagaacagcaaggacgacgaggacatgccctgggcgtggatccccctcagtgaggcctccccactcagcgttctggcctcatgccgctcttcatctgacacttttccctctcgctatgcacagacaacaagcttgcggcaaagcaagcgctagagggcgcttttgtccttcgcctgtaccttctcgacgacagcggctcggacaagggggccgagtcagacgaggacgcgctgcgcgacgaccataccgcaagttgtgtcctcgtcgacaagatggacaagctcgacgacagcggcgagactgggcgaccaaatatggacgtcgacctcgggtatgtcttcaaacctctcgcttgtccctcgtatcgtttcgctgactctcaggccgctgtacaggcttcagtctcggtcgacattgactcctgccgcccccaagtcatctcaccggctcaaaatggcctgccaagtccttccaaaggccgctgtctctactttcattatcttttacggcctcggtgagtgtacacccatctgaaaacgtggctgccgccgagctgcgacgttgatgcaccgatctgctgtaaccagctatgaactcgccgctcgtcgctgatgtctcgacaaacgccccgaccggctcagactcgtcctcgtcatcctctccacgtcctcctcggaggctctcaaagcgacgtcaggaaaatgagcccgagctcaagccgtcttcgcggagccaaaacaagcgcaggttgcctgttccaacgccctcgtcgcctccgccggcgcgcaaagttctctggcagccaactcctgggacccgcccgctgagttcatcgccttggcagggtgcctcgttcacacagtctcagtcgaccgcactcgctgccatgctcgccagaactcgggcgaggcaggaggcgaacggcaagacgaagtcctcttcgttccagcccggccggtcttagtcacgaccgagcccttcagcggccgctcccgaggtcctgccccaaagaccatttccaagatcgtagagttcatctttgagaaggctaaccgcatcggcaacccgtcctcatcctcggctgtacgagcgtcgtaaagcacgactcccgcgcaagcgcgacgaacggcgacgccgacggcgctaaggacgacgagtcgtcggacgcctccaaggctggcgagcaggaggcgggcgagaagaaggcagaggaagaggaggcggacgaggaggaggacgagggggaggagaacagcgggtacaagtctgatgccggcagccaagcggccgtgcaggctgttccagaggagcaagaagacagcgaagccgaccgggcggcctcggcaatcagcgcagcacacggcgtagcaagcgcccaaaacggcgggccacaggccattctatccggttctagcagcggcatcgctccggtcgtcgcgctggtcgagccagacgcagctggcaacgttgctatggatgccgaggataaggttgccgagctgagcgacggcgactctgacgacgacgtcaagggtaagaaccgggaggaaacgctttgagtaagtcttggcctgcgctctcctgacctctcctcttaagaccttccgactgcctctctgggctctttcttcagaccgagatggcggcccgcctcgccaaagctgtccgcgggaggctgagaaccaagcgaggccttttcggctgatcaagactctgggcttgcaggaggatcacgatgtcggtcttctttgttctgtctcgtcccctcacagcccgaccgctgaccatctcgacttttgcgctaacaacaggccgtcgtcgctgccgtcatcgcgaccatccacggacgcggcacgaccaaagtcgtcgacctcacactcgcctttctcgcccgactcaacccaacgtaccactggccggcccccgtcgacccacgcctcgctgccgacgcacatctttgacctgttcgactacatcgacgacgccatctcggacgccgtcagcgccgaggagctcgagaagataggcgtcctccggacggcatggcgcgcctcgtggggcgactcgccgcaagcgatgattgagggccggcgcgaggtcaccttccggtgcgcaaaggggcgggccgagggggccgcccgggtagcggccgagtcgctctgggctcgacgagttgtcaaacttccctgctgggctcgctcgctctctcgccgccccctccgcctccacaatcgctcccctcgcgggcccgacccgtaacgacacgacagctatttctcgtctgacagccgcctctctcacgactctgacgatgccaagatttgcacatgccttcctctccgtctgaggaaacgtctcggtgcgaccgctgcacggcgcatctgcgaggtcaagtgaacgtggtcaatcgtgctgagagaaagagggggacaacaaaggggagggggtgcagatgaaagtggtatctggatgcaggcgggaagagcggagacgacggagtgcgtgcttgaatggcgtcatacaaatgagagatgaggcgagagcgggacggggtttgtccaagggcgaagcgagagagaaagacgagtgaccgggtagcggaggctgcaatctgcatggggccgacgggttagaaacgggatctcgcaacgctccgaagagaggaaggacgcacccaaactagcgaggcctcacaccgtgccttcctgggcccccggctgctgcagctgatgctcggccctccctccgccactgttgccacgctcctccaactctggcggctgttgtgaccctgcctggttgccgccagcaccgcccccgccaccgccgccggtagccgttgctgcggccgctgcggccgcctgagcctgcgccgaggcgtagccgtctggaaagaggccggcctgcatctggtagccgtagttcgggaacgagggcgtgtaatagctgctactgctgccggagccgacgccgttgttgttgttgccgccgctcgactgctgctgctgctgcgactgctgcgactgcgactgctgcgactgcgactgcaaaggcgtgtgaggctgacccgaatgcgattgttgctgctgctgctgctgctggccgagctgtgggtcaaacgcgccggcgttgataagcgacggctggtagtacggatagccaccctgagcggcgagcgcctggttgagcgccgtttgctggtgctgatgctgctgctgttgctgttggagctgctgctgggcgtgcgaatcaaacggccggccaccaccgccgccgttcccgccgccgccgctgttgtagaagtagttgttgatggtcggagcgtagaaggtggcctggtttgacgtgccgccgagcggaggcagctggggcgcgccgccgttcgagttgtagccagccggcgaggccgaggcggcaagccgggcgtgggccatctgctgctgctgctgctgctgctgctggagctgcgaatgcagcgggttgaagaagctcgcgttgccgctgctgccgccgactccactgctgggcgcagcgtaggccgaggtatcgatcggcgggagctggtgtggactcgactggctgttggaagaggggtgaagaccgccgccttgtgagggcgccaggaggttgttgctgcttgagccgccggcctgctggagaccgccgtcgccgctgctagacgtcgactgatagtagccattgtgctgctgctgctgctgttgagcagcgccgtgggcatactgctggccatacgagagcgtcggttcaaggccgtgcccgctaaagggaacgtgctggcccgtggttgacagactgccgtcggccgctccggacgagttgtcgacgcgcgggcgcttggctccgcgcttggacgattctgcaccgttagcaccggcagtgacgacagtgccgtccttgttcttcttcttgcgagggcggatcttgccggcccgcttggcgacgaggcgggcgtgccgaaggccgcactgccggatgagacgagccaacgccgtcagcggtgaccagcgcatgcaaggaaattcaaggcggacgaacggcgttgcagaggtccttgagcccgctctcgcccttccgccactcggggctctccttcaggccgcagctgacacactcggtgacgcccttcggcggcttgccctcgttccggagctggctcgccggcttgcgaaggcccgtctcgttgacgctacctccgcctggaccgcctcgctggctgggcttcttcggccgggggacagttgagccgctcccgtcggcagagtaaggcgcatgcgcgctgccgtcatcgtgcgcctgctcggcatgttgctgctgctgctgctgctgctgctgctgctgctgctgctgctgctgctgctgctgctgaaggaggtgctcgtcgaggacgccctcgaggccgtcaaccgtgtcatttacgagccggctctcgtcccgttggatagagctgctgagactcgggtcgtccgtgtatggcccaatcacgtcctgtgcctgctcctgctcctgctcgtcgtgaccgccaactggcggcgggccgtcgagcaagtgggcgaccgagctctcgcccaacgagtcgcccccggccgcgtgggcctcgtcgccgccgccatcctcgtgcgccggctgcgcagagggcggtgcgaagccgctgctgagggcctcggacgcggcgacgaggtccggatcgatgtcgagccggtgctgctgcgagtcgtcgtgtgcctggagctgcgactgctggtgagacggctgctcgccgtgctcggcagactgctggtcgtcgtgaccggttacaggatggcctgccgactcgaggtcggtcgcgagctggtgctgctgtgcgtcgccggcggtcgacatccgtgggcaaaggggccaagaagcgatcggtaggggagaggttcgatcgctaagagaagacggagagccgggcggtcggcgagaggcgtgagatgcctgacggcagactctgcggcgcgaccggcggacgagcagacggaggtgaggacgtggcctcgactgctaggtggcggatgctgtccttcctgatcctggcgtgcttggaactgggatcgctgttgcttcttgtcggccgtcgtcgctgctcgctgttgcttctcgccctggcctcttcggcgcgccggagcgagcagccgacggagcgagcaggcaggcaggcgagaaggagctcttcaacggcacctccctactgatcgagacatgtttgctaagatagacagcacggacgagcagtcctccacctgctgccagctcctcaacaaagctggaggatgctactgagggacgctggaggtggcatgtccggaggcggcctgtctcagccccaacccagcctggacgcgaccgtttctcgtcgacgcgccctcgtttgcgctacctcgcccttccctttgacctgcaccccgcttccacccttctcttttcttccttctcttcttcagacatgtctgctccgtctgttaccgccgccgtcatcggcaaggatgtacgtcgtctgcttcgcctctgatctgtctcgctaagggcgaggacaggaccagccaggacccgtctcctcgtccgaagaggcccgctcgctgaccatcgtttcctctttctcacgctccctctccagggcaaggagattgtcaatgtcggccacgagcgcccgtcgttcaagtcggtcgtcccgctcgccgacctccgcaagctgtacatggtcagtcgcgttcttttcttgagccgccacctccgatcgacctcttcgcgctagctcgggaaactgaccgcctccttcttgctcgctctcaggccgacccggagaacaaggacaacacgctcctctcgaccgcccggtcgttcccgcgcgtcccgctgatccccaacgccgagcgcaagcgcatactcgtcaccggcggtgccggtacgtctctctgcccaaggcgcgcgcggcctcggcgcgcctcggaccgccggccgcgtttgcttgcttgcctccgccgccccttctcttcacttgagctgacccttgcgcccttccttcatcgccaggtttcgtcggctcgcaccttgttgaccggctcatgatgctcggccacgaggtcaccgtcatcgactcgttcttcaccggcgcccggaccaacgtgagtgaccccccgcctctttcctcagcgcagcgcgacgagatctcgccgctatcgtccgattgcgacccgcttgattgaccgtggattggactgacgcgctcttaatcgtcacgcaccaggtctcgcactgggtcggccaccctaacttcgagctcgtccggcacgacgtcgtcgagcccttcatgatcgaggttgaccaggtttaccacctcgcctgcccggcttcgcccccgcactaccagtacaacgccgtcaagacgatcaagacgtcgttcatgggcacgctgaacatgctcggtctcgccaagcgtgtcaaggcccgcttcctcatctcgtcgacctcgggtgcgtgcaagtaacgcgcagcagcccgagcaaagagatggaacaggctgctaaccgacttgcgccctccttgccccctcttgcagaggtctacggtgaccccgaggtccacccgcagcccgaggactactggggcaacgtcaaccctatcggcccccgggcgtgctacgacgagggcaagcgtgtcgccgaggtgcgcgcccgtctgatgccgtcctgccctgctactggaacagctgttaacctcttcctcctgcagaccctcacgtacggcttcatgcgccaggacaatgtcgaggtccgcgtcgcccggatcttcaacacgttcggcccgcgcatgaacccttacgacggccgcgtcgtctccaacttcatcatccaggctctcaagggcgaggacatgactgtgtgcgtactctctttcgccaaattcgaaccgttggcacagacgccgcattcgggtttcgaatgccttgactaaaggctgacctcaagcttggcccgctctgcatcagttacggtgacggcagccagacccgctcgttccaggtgcgcactcctcgctttgcttgcccctgaaggaccgacctcagctgacccgtctctctgccccttcacccctacagtacgtgcacgacctcgtaagcccagctctcctcttttcaagctctgcagaccgcgccccttggactaggaccctcccgctcacgctgatccgctcctttccaggttgacggccttatcctcctgatgaacgtgcgtcgttcgccgtctctctgaaacatcttgcgtgctgtcctcgctgaccctccttccttgctcgcttctgcagggcgacgagtcgcgcccggtcaacatcggcaacgacgctgagttcacgatcctcgagtttgccgaggccgtccgcgaggttgtcgagaaggtccagaaggagaagggctcgttcaccaagcgcgtcaacattgtccacaaggaggtcggtccctgctgatgctgctttgcttggtcgagtcgagcggtcgctgactgctgtccttttgtcgacctgcagatccccacggacgaccctatgcgccgccgccccgacaccactcgtgccaaggtccgttccgccgagaatccttatcccgacgacagcctgctgacgccatgcgcttttctgccctgcaggagacgatcggctggcagcccaactttaccgttcttgccggtgtcgaggagatggtccggtgcgtgcctcctgtttgctcgcctggtcgaccttctagtcctgacgtctccctgcttcccgcccggtcacagctactacgactcaaagatggccgagggctcgatctaaacgacctttcgctcccttcttccgtctgtttgcttttccccttctcttcctccttctcgcttctttgggtcggcatgccccttctttactcttgatccgtcgcctcatgcgcatgcgctcctgccgctgcatgcttcaccctggggttctctactgcatctagaccatgggctttgcattagaccgcggcgccgtgagcgagagggctgtctttgaaggcagagaggggcaagtgcactcctaccgtacgctcaacgccctctatggcgagagaactccgtcgccggtcatccagaggcggctcctttccaaacgagagtctgactgccagcttgcgccaggcgttccgagccttcagtcctccgctgaagggtcggtttgagaatttggcgcggccaaagttcagaactccagactctgggtcgcaacgccccaaaccactgccatggtctgattggctgcttctcccacgcgcgcgcgaggcctggttgcgacgccgaagcggctcgaccttggccagcgctccctcagaacggctctcactactctcaagtcacttcgtgcgtgccaatcctcgccctagaaggcccgtcctgctgcccggacgactgctcgtatccgggtcgtctaggacggatgctcgcatgcatcgctagagagggccgtcgtgctgaccgtgcctcttgcctcgctgtgctccccgaccccgacctcaggctccaaggtctttactcgttaaagccccgccttcaccttcaagcaaaagtacgcccccagccccccttttgcagctcctacaccgaggggataacatcgtccaggatcgaccggcgcgagctggaggcgggagtcaggcagggagtctgcggcaccgcgtcgagctcgcctgagggcgggcctttggtcagctcgctcggagcacgcgctgcagctcggtcgcttggcctggcctggcttacctcttggcgaggtccagatggctacagggcgaccttgccctggctggcatgggatcttgtcgaggcgggcgagctggccgtcgagcagtcgagctcagctttgcgcgtgctcaggtcgcttcggccagcccagccgccgccctgccctcccgctcctccagccccgcagctcgtccggttgcctcctggcatcctcttcgcccggccgggacagaccgctgacggcccaaccttcttacagtgtctcacgagtctgtgtggttctcgcgcccccgcaagttcggaaagggctcccggcagtgccgcgtctgcgcccaccaggccggtctcatccgcaagtacggcatggacatctgccgtcagtgcttccgcgagaaggcggccgtcattggcttcgagaaggtgcgtcttgcgtcctgcgctagctacattcgctcgacctcttgcgggttcggctcggctgaccattcgctctttcttttgactcgccctgtgacagaaccggtaaacttgccgtcccccttcttcccgacctctcacgccccatcgccaacggacaagccttgagtctcgaatgatgctcttgtgacgatctcacccgagtcgacccggtgtctgcgccggctgcgcagcgcgactttgggagggggcctctgggagggacgagagtgcatcgtgtcggatgcagcagggcgaagggctatcgtgcgccccgtactgggcgacatttgtgtctgagtgcgggcgacgacctgaggggcgagcgaccattgggaggtcagggtggctgggctcgtctggttcgagcgggagagcggtgcggcacgtctgcattcgtgtgagattgctcgaaaggattcgacgggagctcgacactcggttcattctaggacgctaagagggccgtgccagtcgtacggaccgtagagacggacccctcgcgtgcaccgccatcaggatcagctgcatgagatcgctacattttccagaaacacatggttcgcgtacgccactgccgacagcgacggcgactgccgcatctgagtgtcgcccgacctttgtgcccctgaccggctgagagtgtgttccaataaggagtgcatgagagaccatgaggtggacgagcgaacgcccttttaagaaaggggaaaggaaagggagggtgcggcggagtgagagggcgagggccggtctagacccggacggtgggcaggaagcgtacagggtgtgaaaaagagtgcgaagccgagagaaaggaaaggtgggtggagcagaagcgagcgagagggaggcgaggagggaaggcaagagaccgtctagtcgaacgagatcttcttgccggcgccctcgacgatgccgccggtccgggcgctgccgccacggggcgcgccacggccacggcctccgccccggcctccccggtcgccgaagccaccgcgtcctccgccacgtcctccaccgcggccgccacggtcgccgccaaagccaccacggcctccgccccggccgccgccgaagccgccgcggcctccgccgccctcgttgttgttgtcgcgcgggggcgcaaagtcgagccggacgttgcggccgtcgacgtcctggccgttaacggcctcgagggccttagccgaggccgactcgtcgccaaactcgacgtaggcaaagcccttgggcgcacccgtctcgcggtcggtcggcatccggaccgacacgacctggccgtggggctggaagagctcccagagggcgtcctcgttcgagccaaacgagaggttgccgacccagagcgtcgacgagggcgggttcggcggccggtcagacttgtactcgcgcttggcgttttggtcgcgcggcgcccgagcggtcgcgtagtcaatccggacctcgcggccgtcaatctggaggccctgcatctcgaagcccttggtggccgcggcctggtcggcaaagtcgatgtagcccatgcccttcgaccggccggtctcgcggtccatctggatgcgcgcgccggtaatctcgccgcaggcggcaaactcctgcgagagccagtcctggtcgacgttccacgagaggttgccgatccagagcgtcgtgtggggcgggttggcgccagagtgggcggcgccggtcgcgcccgtgaacgaggccgactggtcggcgagcttggcccgcttcgaggtgccctcgtcgtcgtcggccttgcgcttcgaggcagcaggggcggcgacgggcgtggcgtcaacctccatcttcttctcctcctcgtcgtcagacgagtcggacgagtccgagtcggaagagtcagagtcggacgagtcggcctggggagcggagaggcggacggtaagaggcgacaagtcagccatcgccactctctatcctccgacccgaccggacgcaccttcttggcagcagcagcggcagccggcttcttctcgtcatcgtcctcgctcgactcctccgagctcgagtcgtcgctcgactcctcctccttggcagcagcaggaaggacggcagcggccaccttcttggcgccctcgacaaccttctccacgaccgtcttgggctcggcctcgtcctcggacgagtcgtccgacgacgacgagtcggacgacgactcctcgacggcggcggcgacggcagcggcagccttcttggtgccgttcgactgaagcggaagatcagagagaagacgattgggtcagcgagcgtgctctccccccaggtagattgcgagcgacgcgaggcaagatgaggaaggaacgaaaggaggaggaggtaaatttgccgcccgaccgccgagagggcgcggtcgacgtctgcgcgcagcacacgcgagacgaaagaggagcggcggcgaggccaaggaagggtgctgaacagcagttgacagtcctgctccctcagagagcagaatgattccaccggccgagagaagagctccgcagggtgcgcagttacagacggcgggctggcgcgcaagcaggagacgggaggaggggagggaaggggaagtgaacgcacggcagccttggtggtggcctcaacagccttctcggccttcttgctgacggcagcggccgtcttcttggccgactcgacgacggcgggcgcctcgtcctcggacgactcgtccgatgactcctcctcagaggacgacgactcggacgacgacgagggcggagggggcggggttggctccttcttcgacttctggaggggcggaagccagagggtaagcggtcagccagacgccgggcgggcatgagcaccagggatgtggcaagagcagctcagagtcggaacgactcgagctggcttggaagcctcccgtggcgaagggaacgagacggaccttcgacttcttctccttcttcggggcgacggcggcagcgaccggagccggggcggcgacctccttcttctccttcttggacgacttgtcagactttcccattgcgagcgagagggtgttgggtgggtggatagggaggggtggggtggttggtgtagaggatgacttcgggagcagcgggccaaggcagattcgattcctgcgcgcgcgcgttccaaatcattcaaactccgggcgcggcagaccggatcaggccgacgccctggacagacatgccagactccagcaatcgagcctggcgttgccctttcagcggtgcttccgcccggttgcttccctcagtcagcccactcgacgaccatcgtaccttccagcagcaacgacgacgagcactcaaagagacggccagatcatccagttgcaacttcactcacaaccactaccgcttccttccgccaacttcacccgaacttcaccaacacccgccacccgccatggcctcgtcttcccggagctcggccgagatgttcgtcgtccggtcggccagagagtgctcccatccgggctgccatgagcacgacttcttgccgattaccgtgcgttccactcctgctgctcttatcgctcgcttggcgcttgctgcctgtgtgtcgagagcgaccgaagtgactgactcatccgtctcccccgcctgctgccctgccctccaccacccgttgcctcgccattctggctaatcgcccgtctgctcgtgctctcctgctccaacgctcttactgcacctcgcctttcgatccgatccgatccgaccgacggacgcttccgcagtgcccaggctgccagcttccgttctgcctcgcccaccactcgccctacctcctctcctcctcctctcacttccacccctgtccctcgccaccacccgaccgcacgccgctcccctgcccactctgcgacgcgcccatctcaactgcgcccggcgcagacccgaacgacgcgatggaccggcatcttggcggcgtcgcgtgccaggagggcgcggcgaggcgggggatgccggtcgagcagcgcgagagggaggagcgccgtgcgaggcggaggaaaggcgagctgtgctgggataggcgctgtcggaaaatgacgaagggcggacttggcgtccggtgcgaggtaggtcgttcgcttcctccttcctcattcaccctgctcgtcgagccgcgcagcacgacactgaccttcccttcctatctgtcgccctccagcattgcacgcacgtcttctgcctctcacaccggacgcccgcctcgcattcctgcacgccttcgcccactcggataccgacgccctcagccggcacggccgcgcgcaagacgcccctctcgctctcgagtgcgccggcggccgctgggctcgctgccctccgtcgccagcagcagcagcagcagcaggcgaagccctcatcgacggcaccgtcttcagcagcaggcaagccgcaggctgacaaggttgagccgaagccgctgacggcggccgagaagaacgctcagggcggcaatggcagcggcgggctgaagccggtggcgaacccgtttcggggcgccgggcagaaggtggtcacgagccggtgaggatctccttctcttcgcattcgcctcctcaacacctcttgcgtgtctgttgtcctcgacatcatgtacgcccccttctctttccgccctcctctgcacccttctcctttcccctccccacccatccctcccgcccgctccgatgtccttcatcgcgcccctctctccgcctgacgagcacgtcttctcggcccggccgtcgtcgagcaaggcccaccctggtggtggccgctcaatttccgaccccttcggcgaccacctgctcggcccgcctcggacggtcgaccgcaagcgcaacggtctgcggaagacaaggaccgaagcgaggtgcgccgctcgagccttgcctcctggtcgcgagatccggaccaagccctttgacagtcgcatcagtgctgatcattcttccccatacgcctctcgatattcagcctgccaaccccgccccggacgcgcgagcgcgttgaccggtcgtcgaccttgcccgatgccgcctctggcgcaacccggcgacgcgccacctcgtcctcgctgccattcagcctgccctccgatcagccggtcgatggcctctacgctgcgccgaccatcgaatcgtcttcctcgcgcacggccgtcgccgcctttggcgcgctctcgccgcccttgacgggcagcacgcgagccaagaagcgtcacccaacgcaccggcaggccgactcgctcggcccgacccggcgagcagcacttaagggcggctacgtctcggtcgactggaaggccggtcctcatccgccagcctttgcctcttcaaccgccgaccacgctcaggcattgccgcccctcccgaccgcagctgaggtcgcggctgcccggcttgagaagctccgccggaatcgcgacccggccaagggtccaatctgggaggaaggcaacccgttcctcgagggcatgggcctccgcgcgaagggcctcgtcagcgacaagcagcgcgttggctcgctcgaagaaaaggagacgatcggctacgtcttgtgcgtcctccttctcgagacgctatgttgatcgacgcgcgcgcgcgttccggccgaccgcgtcagatttcgctgacgttcgcttcctcttcataaccccctcaccagccgtggcaccaagacggtcttcgccaaccccttctacacgggcgagcacggcccgctcctctctgacccgaccggcggcgcctccgagctcgatatggctcacccagacttcacgccagtcgccaacccgccgccacggctcctgttccctgccctcgggcggggcgggcacaaggcctcgtcaacatcggcctcggcccgctcgcgctcgaggagctaccaggctgaagagtacgacgacgacaacgacgacgacgacgacgacgacgacgacgagctggagatgcaggccgtcccgcgtcggctcttctccggcggtcagcccaccagcacccgcgcagaagtcgacgacgacgatgatgagtcggacgagatggacgtcgagtcttcgccggccgatgctggccgccggggtcgtgcgacaagcaagcgttcgctcgacgctttcggcggcccgatcggcgagccggcggggcgcgacgcgaccaagcgccggcggctctcgaccggcatgcacggctgaagtcgtcgcgcttcggtcccgccgaccctgccttctcagacgcggtcgtcgtcatctggctcacgtccgctcagcgctggcgctgccgattcctcaaccccctgctccgcctccgatcgctgcctcccttggacttctttccggacctgtagacaccccgttgtcccataccgtccttctggccgccaccggtgcgccccttttgattgcaacttccatagtccgtagtcgatccgtccctgtgctcgcctcgttcacgtcttgatgtctcttggcgcctccgctgggctactcggatcgtaagcaggcgaacattttgaaagagggtgtcggaatcgcgggccgtgcattagggtaagctactgaggaaagagagggcggagtgatacacaggaggagaacagagacctcgttcgaaagcgaccaaagatagaagggggcagtcgagaaacagcaatacctctgatgcagccctctagacagctgaggtctgcgccggagtggcaggaacgctgttgacaggcatccctccggtcgccggctgactggaagcgtttgcgtcggccatctcgccttcgacgggctgagcgctcttgtgtgtgccgtgcgcgccggccgaggagaggcgagcgtggtcgtaaaccgaggtcgaccagacctagcaacgagcgagagacaagtcatgtcagcatcggcccaggactgctttgcaagatgccacgagatcgtacgtacgtccttgcccttccgagacgattcgcggaaggcgagcgcggcgaggccgccaaggagggctgtgacaatgagccaggtgatccagaggaaggccaaaagtgcccggtgctgggagcaaccgacccggtagtagccaagatagaccgaccgtgggcggctgcagtacgagaggaagtagctggagtcgttggtcgtcgcggcagcggcagctgcagcaggacaaggacgtcagttggcaagggatgcgcaatcctacggcgagcccggaacgcaccgagccagaagatccaaagaacgccgatgtttgcgagcacgaagcgagtctggaggaggacgaagtctggtcgacgaatggcaagaactagtctgtgctccgaccgtcagagaagcggtcgtcagctctaaggatcctcgcaagggatggcacgaacggactgacagaggcacgatcgacaaccacgtccagacagcggcgaagatgttgaaggcccagacaccggcagcgtcgcctcccgcccgtcggacgaggtcgccgtcgattgcaaggacgatgagcgaggtgaagagcgtgacgagcagcagcaccgacaggatgaggttcgtgcgaggggcgaacaggatcatcgttgcagcgagaggagctgtgagttgagcgcaggagggttcgagctggtgtcgttcgatcgagctgggaaggcagcaggagggaagagggtcatccgcactgtcagcgcctgccgcttatgagtcgcgagcggatgcgtcgggcggccaagcattccgttgccttgcggcgaagacgggcgacggtttggacgggcgcccgtcttggctcgtcagggggatcagcagtgcctggcacggctctcgggtccaccggccgagcatgggacgagcggcagccgttgcttgtcgcaggctgagtgactgactttcgagacaaaggggtggagcgagcttgcacgacagtgccggccgtccacagccggagacggcccgagggcgagcacatgtcttggaagtaggagtcagcgagaagctggcacggccgacgacggcagctgtgctacgatggttgacggtgcaggagcagggacgaagcacgggtcgcaacataacgtcagctacgcagcaccgaaaccgccgggctcggcgatcgccgtcggcagccgcaacagcgtcagacgacaacgtttgcagaaacatcgagggtggggctgtcgacgggccgtctgcaggtcgacaagagcttgcactgagtgttcagaagtgtggcggtcaagggtacatgagagggcaggggtagggctacatgcagcagggcgccttccgacccggcgctgagccggaaggcgaggcaggaaatgacgatacagcacaagcgatggaaagtggtgagtagacggagagagaacccttgagagagcatgccggccgtgctttggccagctggtcccgcttagatgacgtttgacgacgcttcgatcggacgctcgcccggacggccgccagagacgctcgagccgcgacgggtgtccggcatctccttccacatctggtcgctctgctgagacgaccgcatccaagggtactcgaagatgggcgtcgtccagacctgcgcgcgagacgaaccgagacggtcagctacattccaccgccgggcgcgtccgtcgagaaggcactacgtgtcggttgccctgtcgcgactccctcagcgagaggaaggtgagaccaaggtacggcaatacggtcgagccccaagcacaccagttgagtgcgaggatggctttgtagtagtcgcaggaggtgaggactgcgaggtctgtcagcgaggcgcgacgcacaggagagcccaaaagaaactgacatgttagataataaaacgaagggccctcgcagtagtagaggtagcggtaggggttcctcggattgatggtccagccgatggcagtgccgagccagagcccaaagatcaggccgagcggggtgagaatatacgacgtgtgcaggatcttggaccgcggccggatgcaggagacgacggcgctgcgacaagccgtcttttgtcagagagagcgagctatgaggcccagtcggctagagggacatacaaagggacgacaaacagccaagtgacggcagccgccacgaaggtcacgatggtcgagccggtcgagccgccctctgaggggagattgagggacgggtgtcaggggaaaagacggtcgagagtcggagcgagcagtcgagcgtaccggcgccttggacgaggaaggcgttgattccaagcgtgcccgtcgcaaaagcgaggcagaaggcgaggcagacggcgacgacgatgccgacggggttcgtctttgacgatgaaaccgacatgctgcaggccagaacgagacgtgggttggcacgtgtcgagccaggcccggtgtgagctctgcttaacgtacctggaaagcttgcagagtaggtctggaaggggccggaggcgctcgagaacggcgagaggacagtcgtcgctgtcggaagggggggggggatgacggttccaagagagcggccgaccaatcggtccctccctttgtagggctcgctcccagctccgcctaagacgcgtctagcgggcgcccgcgcctgagccgcgtgctgaggattggagagaggcaggtcgggtcaggctggtcgttggagctgcggcaagacgtcagtcattcttggctggcgctctgttgtttggttctcgctcggagccgaggcgaaccaagcaactcggccgccgccaccggcacacacgaagacggccagatggtcgaaggatcattaagctggcacgggaggcattacaagaagagagagagggcgttggtacaggtcgcgggcgcgatgccggggcaggtgggaggcagcaattagggggcagggaggacgcaaggattcgcccggcgcgagcagggcgctggggttcagacagaggtgacagctggcgccggagcggtcaggtgctcgtccttggtggcggccgtcatctgcggctgagcatcgtccttgaacgagatgccgccgtccgccgtcttgtgcgtcgtcgtcccgaaggggtactcgtaggccgaggtcgaccagacgtcgcggtggcccttcttgtgctcgaggccggtgtagacgacgaggccaaagaggagagcagtcagagatacccaaccaatccagctgaacgcgatcagggcccgtgcgccagagcagagcgagtcggtggctggcggcgggcgatcaaaagacagggagggatgagcaagtcgaccagaagtgtgaacgacagcccgacagacgcaccgagaagcgcaaagcggacgttgccgcagagagagaggaatccagagaggctgtcggtgttgccggcggcaaaggccactgccaagacaggggctcaggtggagtgtcagtgggagcagaacgacagcaggaagcggcggcttgactcacgccagaagacccagagcacgaacaacgtgccgacgacgaagcgcgattgaagcacgttatgcgcgggacgcgagtggccgaaaataaggctaggtggatttaagacggtcagctccagagcagcctcttcaagcgcagcaggttgcaaactcacagcgcgatgaatgtgatgatggaaattgaagcagcggcgatggtaaagctgtagaccggcgcaacggcgcgaccagcaactgtgtgaggcgggttcagcgttaagccagctcgagcccagccaggtcgtccagacgcctttgacgagcgcaggacgtacgacgctggatcagacgggcatcgagaccgaggacggcgacggcgcagagcaggatccagatagtgaggacggagaaggcgagccggtgccgggtggcgaagagcgggctggtcatgctgcttgcgaaagcggtgggtgctgctgagtgtgggtcgtgtgaggatgaagagaccttgcggtgttgtctctgctgcgtttgcgcaggttatgaatggatgggtgcgactgagtgcggctgggtggtgggtggtgggtgagcggggttaggagggaagagaggcccgccgctgagtccgctgcctgcttcctttagagggaggagggtgctggggacggcaaggggctgacgttgccttcacgagactcctcccgcttgtagctggctggcccgtgacctagcgcgtcgaatgggggcacagacgccgagcacgctttaggcgtgccgagcgggacccgtgtctggccgcagccgcgtcttggcccacaacgccgctggattagccgtccgcgggctcgtcggcccagtgacgaggggacaggagactggttccatcctacgacctgggctcgccgagggtcagcggcgtccgaaagcagcaagctcgggaagcttgcgagacgcgtgctgcggccactgctgttacccgaggaccggctcatgctagatcgacctgagcgagaggctgctgaggcgtaatctgcgtcgaggcaggatctcagcatcgactaggcggagaggccggtcgagcgagggaaggttgacggcgaagaccggcgaccggctcgagggtcggaacagcggcgtcaatgacactcgactacggaccatcagcgaggcactgtacagggagcgccattgtccgggctcgcaccggtcagctaggccgagcgaaaggagagatgaggagagatggccgtcaatagggccagcaaggcgcctttggcttggctggggtcaagtggctgagaggcgcaggcgcaggcgagcgacaccgcccgctcctccggctcggcacgtcgatgagatgctgctgctggcccttgctcgccggacccaactctcacacccttatcgaaccatggccgacgtagacgcccttcgtcgccggacggtcgtcgctccggcgctcgcacccgagattgccaacgacgagcccgtgctcaagcccgtcgctcagtcgacgaagagcgtctccgccgcccccgtgagtctcgacgcgacgacgacgtgctgcacgtcgctgctcagagctgactcgttaccctacagcctacaaagacagcacgctcggtcgctcgccaggctctgcgcgcatttctactatcgctcgccttcggctgcgccgtcttccaggcttacggcgtgagcctctcgaggcgccgaagcggggcacgggcgactgcggctgatggcagcggcccatcctttccagttcctctccacaaggaaggcagacgtgacgccgcaagacaacgcctctgccacaaaggcgtcgggacccttcgacttcccgaatccagtcttcagcgcagacgtcgagaagcgcgatgccgtcaagcaggcgttcctggttcgtcggcctggcaggtcggacctcctcagcccgcaacctgctgacgctctcacctcgtcgctctcgcgcagcattcttggcacgcttacgagcgcgacgcctggggcgccgacgactaccacccgatctcgaagcgcggcgacaacatctccgaatcgggcggcatcggcgtgcgtgcagctcaacctccaacgtcaggccaggcttccgtactgacgcagacacctacgcccgcagtacacgatcgtcgacacgcttgacaccctcctcataatgggtctcgacgaggagtacgaccgcgcccggacttgggtccaggatgagctcactttcgacgtcgacgtcgagttcaacgcgttcgaggtcggtcgatccccccttctcgcctcgttccctagcacgttcgttccccggcacgttctgacctcctttgcttgtatttccgttgcagattacgattcgcctgctcggtgggcttctttcggcctaccacctgtccccctttgacgatcggacgctttacctcgcccacgccgtcgacctcggcaaccggctcctcgcgacgtacaagacgccgtttggcttcccgctgtcgaaagtaaatctcggtcaggcggtcggcatccccgacaaggacaaccgggggctggtgtcgctcgccgaggtggcgagcacgcaactcgaactgaagtacctgagtgagatcagtggcgacgaccgctactggaaggcggccgagcacgtcatgtacgcgatccgggaccagccgaactttgacggcctccggcccatcttcatcgagtgggtcgccttcttctcgcttcctacaagaagggacggctgctgactgctgctcgcccgccagccctaacaccggcaactttgtcgcgagcgagatccggctcggctcgcgcggcgacagctactacgagtacttgatcaagcagtacctccagacggacgcgaccgagccaatctaccgcgagatgtacgacgaggccatgtcgggcatcaagaacaagctcgtccagcgcacccggaaaagcggcatggtctacacggccgagcttgccttccagcttaggggcgagaagcagtgcgtccaccgtcttgcaatctgcttgcatcgcgctcctcactcatcgtgttccttgctcaccccctgccaaggggctggaatctgagtcccaagcaggaccacctcgtctgcttcctgggcggctcgcttctgctcggtgtcacagaggcccgcctctcggtcccgccgagcccaaaggatttctcaaaggccgatctcgaggactggtacgttgggaccggcctgatcgacacctgcgtcgagacttacaacacagcgacgtgagtaccacggcttccgcttggacctatctgcgccaaaagctgacgccgagccgtcatccacgtcagcggtctcgcacccgagatcgccttcttctaccccgacaccgacccgaggagcgagacatcggactggtacatcaaagagtcgacgtgggtcgctcgccgtgctgccagctctgagtttatagccgtcgctgacgtcctcctcgactttgacctggtctgcatctccagtgagaaccgcccgctgatcgacgcgcgtaacatcctccggtgcgtttgaccctacagaccaccagcgcctctgcagcgctgaccgcgttcgcgatttgttgcaggcccgagacggtagagtcgcttttcctcgccttccgcctgacgggcgaccccaagtaccgcgagcagggctggaagagtacgtgccggcgccactcgcttgaggccaggtgacaacgctgacactcagctcatgcgctcatctgacctcttccagtcttccaggcgttcgagaagcactgcaaggtcgagactggcggctacgtcagcattctcgacgtcaaccagctgccggtcgagaccgaggaccggatggagaccttctggctcgccgagacgctcagtgcgttctctcgctcgctcgcaccgtcggccccgattgctgacctcgaccgacttcgctttgcagagtacctctacctcctcttctcggacgcctcggttatccctctgacaggtacgtctcgcatcgctgtgtcaatatgatgacgtcttacttacccgacttcttccgggcgggcagactacgtcttcaacaccgaggcccacctgatgccagtctttacgccgacggtcgtcgacagcacccagctctgatcttccatgagcctagacatgtcggaaggctctcgtcaaggggcacagcgtcaggtcaggagcttcggcctaagcaggaaagaaggagggtgcgagggagagcgggaagcgtcgctgaggtggcgagagacgagtcgcaggctgaacggaaaatcgtaaggcagcttcagacggagaacaccgttcgagcgcggtccgggtcgccgggccgcaagtcgacgagcatgagcggcgtggtagcaggattagggcttaggcagcgtccggccgaaccggtcaacgaggctaaggccacgagcgtggattagggcggcaacctcgcaccaggccgccacctgctccgcatcgtcgaagtcgagctcccagaagctaattgactggagcgccggcgtgtcaagagaagaggcgactgttggcaccgccctcagccgccgaggacgcctgcgacgagtcggagctgctgtgagtcgagtcggctccgatctaggccgcctagcggcgttccttgatggagcgcaagacgccctcgtcaaggtccaggccatccgagcaagagtcgctgccgaagtcgaggtgttgaaggtgagggaagggcgtccgttcgcagccggcgagggaggcgtcattgtgaagactcaaccggcggaaaatcggcaggagtggcacgagctcggccgagttcgagaaggcgcagaacgcacaggactccatctcctcgtccagacattggaagtggagcgtatgaagtcactcgcccattgagctcagggccgaaaggagggcgacttcgatgaccgatgcggaagacgagaagttcagaaggagataaagatgccggagcgcgggaagctcctcgagcagacgatgctcaaggctggcaaggagtacgccggagcccgtcaggtctagggaagcgagccgaacggcgcccggaatcgagatcaagggagagtccttcgtaaagatgacgtggacgccgaggtggcgaagggtgttgacgtcgacgatagcgggctgagcgccgtcgatgccggaccaaatgaggccgcacaccgacgagagggccggtagctgaagactgccattgatcgatccgatccggcgcggctcagtttacaaaaggacgcgcaagtggccggtcgctcccagggtctggagtggctcgagacgggatatgacgtctagcgtttcgtgtcgacaaaccagagtattgaaaaagagtaatctaatcgattcctgaagccgcgcacaagaagctgaggtcaaccgccacgacgtcaagcgttgggaagctgcgagtgaagcaacctaccacccagctgcggcagacggtccgccaggaagccagcatgcgctgtcggtcgtagaggcgccgagcgttgaccgtcgggaatagatcgcagtagacgtcgatctcggcggccgcagcgaagatgagctgctgaatttcgagcggcagggcgtgccagggcatactcggcggggcggagcgagcgagcttgaggtgaatggtagcgatcgccctaagcgaatgtcagccaggcggctcgcatagcaagaggacaagggcagacgcgcatcaatgttgcgcggtccgttatcgatgtctcgcctcggcaggtgggagcaagctgatggtcgatggacgatgcggcggtggcctgtgcgcgcagtctgcgacgacgaacaatgcagggcgaggcagtctggcgaagtcagcctcccgaccgtcgagcagtttgtcgacagacgtgcagatctacacacccgaagacggtgcgatcgacgctcgagcgacgctgtgggtgtctgcaggcagacgggcgggcggtcgcttctcgcgtgcaagggcgtgacctgccggtcttgcgtgccgggcggcggcgcgcgcctctcctcttctccccttcctcccgcatccccatccacgacttgcctcgacaggttcctctcgatgccagcccacgacccgcagcagcagcagcaggccgctccttcgacggaggccgaggacgacctcgcagttcagcagcaacttctgcaccatgaccagcagcagcagcaggacggcgccggcaaccatctcggcccacacgagcctcttcagcacgagacgtcgtacccccaaccgatcgtcgacgtcgctcagcaccatctgccgtcgttcggcgacgacgagagtgcgcaacaccacgaacacgccgacagcatcctcgaggcccacctgaacagccaccttgacgatgaggagggcggcggccgcccggccgacgaccacgtgctcgacccatcgctcgcgaccgaccactcgaccggtggcggcggcggcggcggtgatacccgcgacgcgagtcaagagcaccacgacgccgacggcaacctgcacggccacgagctcggcggagctcagctcgcggtcgatggcatcaacggcgggattgcggcgcccaagactcgtaagcgcaagggtaaggacggcgaggaggccaagccggtcaaggcgtcgctgacggcgggagactggtgcgaaacctcccttccagcatgtctgtcggtcatctgctgatgagctctgtctctggtctggatgtaggatgcgcgttttccagttcctcgacgaccacccagagctgagccagctcaaaatctgccaccacttccgcgacctggagcagggtgcgtctgcgaccgattccgacgtctgctcgagctcccgtcaactgacgacgcgctcacccgccgctcgcagacgcccttagcttcaaccaggcgacgctctcgcgaacgatgcggaagcgcgagcagatcacaaagctcttccagtcaggcccccaggggccgcagctcaagcggcagcggaaggtcaagtaccccgaggttgagaacgcccttctcgcgtggatcgccgagcgcaaggcggcgggcgacatgcccggcggcaaggagatcaagcagaaagtcgtcaccctccagaccgacctcggcatggacctcaacgaaggcggcggcctcaagggcacgaacggctggctcgagtcgttcatccacacgttcgtcctagccgtcgtgctccagaggagcgctctcgagctgacgacgacctcctctttgcagtcacaacctgctgctccctccgaccgcgtcgtccgaggccaagcgggcgaagagggccctgatcgcgggcaggaataagcagagggccggaggcagcgacggtggctcgccggggctaaacgcctcgcagtcaccgcaccccggcttggccggactcggccagcagtcgcttgactctgccaactcgcaccacgtcatggactcgtaccttgagaccgacccggcctcgtacggccttcacgggcacgacggcaacgagggcatgatggaggacgtcgagggcttcgtcttggcccttcctccccaggagcagcacgagttccagcaaccgacagccagcgggggcgaccagcagccgtcgatggatcggccttcgaacggcgagcactcgcagagcaacatcgatccggccttccagctcgccagcagcggcccgtctggctcaggtccgcagcggcagccggccacggcgtcgaccaagtacgagtcgtgggttggccaagtcgaggcgctcgagcgcatgctcgacacggaccgggccgaattcctcgcgagctgcgagcaggacctagccgacgctttcgagccggccgacacggcggccgacctgctgaaggcgctcggccgcctgaggacctacctcgccgctcaccaccagcaccactagcagcctgacggccgccctccgctctcgcctttatgtactccatgccgtcccttgtagccctctgacccctccgagcgcccattttagctcccgcgctagccagacgcactctgaccgttctccgttcctgttgatgatcatgcctttcacgcgtcgctctcggcctcctccttgaatacccacatctcgaactcgtactcgacgcccttttcgctctgaacgctgcgcgggacctcccagccgagccaacggccaagctcgtcggcgctcgcgcgagaccaacggacgtcttcccggaactcggcgaggtgggcgtcgcattgctcgaaggcgggcgagcgcacgcgagtaagcaagatgcggtcgacgagcggcgtcggctcggccgtcagcgcaagccggtagagttcagccccgccgatgaggaacgtgtggttcgagctcgggccggccgatgagagcgcggcctcgagcgagccgtggacggtcgtcaagggcgaggaggagctgatcaggtgcgggagagaaaaagagagcaatatcagcgagctggacggcacggcggtagccggagcgacgcacagatcaagctcggtcgaccggctgacgacgaggttgcgccggccctgcagcggctggaagcgagccgggataccgtcccaggtcttgcggcccataacgacggcgttcggccgctcagccgtcgcgccacagccctcggacgtcactgagctcgaaaggatgagaggttaggcggatcgtgccctggccacgatggacgcgtcgtcgcgtctcgcagaagggcgcacctcgggcaaagtacttcatctcctgtggcaggcgccagggcaggccgcctccgagaccgatcccgttcgactgggtcgccgcgacgatgagggtcagaggggtgcgacgcgtagaagcgggcatgctgaggaagggtggtagaggtgcaagctcattcgaggtcggagggtcaagtcgcgtcgtcggcgtcgtcgccgagggggccccgcaaccgtttctccgcgcaagtacgtctgaagcggtcactcgggcgtcccccgcactgaaagcatggttgtacggctacaacggacatctcatgagcatctacatcggacacgctttccgctcgagtcgacgactttccccgtatggaggcgggcagcgttcgtgtctccgcaaagacgcggacagccggtcaaggcgaccgcggcttgtcgagccatagcctggcgaagtcgctgctcgccgaagtccttctcggcggaacacagacgacgcagatgaacgtgttcgtaagagttggaggtcctgggtgagaggaaatcaacgcgtcagcacgcgtcttcagcatggaccaaagagagtccgaacggaccgagtagagatcaggcgccacgaacaatcagccgtcgcagcacctacggatggtactgttaccacttctctcgaggtgctcggcaaagtgcgagacgatgtcgcggtcgagctttgcccatttcgaaagccggtctgccggctttgagtcaaggtcgatcactttgacatggtcgcacgttgcgtctgtcgatggagtggcagcatcgttcggatcggtcgagggcggaaggtgaagtcgggcgatgatcgagcagtccttgaaggtcgccgccaggagaaaggcgacgaggcggtccttggccgaccagtccggcacgtccgggccgaggccaagccgatacaaccgtgcgaagcgtacatggtcctccagctccacctgcacgttttgaaagcctccggccagagccagcaggccctcgacgtcgtacaagtcaagggaggactgcaaggcggcaagccgttgcaagacggcagagcgctgcagggcaggcagcaggcagtctgccagcgcggcaggaacgccagagtcatcgtcgacgtctagcacgcgtcgcagcctcgagcactgcaccagtgagaagggtcggcgaattactggcagttagcaagggcgtacccagtctaagacaacctcgaggacgcacgtcgtccgaccgaacaacctcgccgttgacgaagagtcgtagactgttgcccttgccttcgatgtcatcgcaccagccgcgccagagctcggcgatggcgctcctcatccgcggctcgtcaccagagtagaggtcgagcgggcagtaggcgcctgcactcgggggtgtgccagaggtgctggcggcgtgagcggcgtcgagcttgagctgccgatgcatgcacgtccggcagaacgtcgtcttgagaacacgagtcgcgggagagaggtgcgtctgactagggaggaagccccacttcggcttccagttgaggcacaaaggggcagatcggcaaggggctcagagatgactggtggtcgctcggcctcgtaccttgatctcgaccgccagcaggtcgccctgcgtcactccgtcccacccaatgagatctgagacgagcatgccctctgttgcgtcaatgtcaagccctcccttcgctcgcctggccgcaggccggtgcggctcggccaacgtcgcgagcccctcgagcatcggccggtcgagcgccagcagccggcagtcgggcaggtaggcctctcccaagagcggtcggatgacgagatctttaaactggagctcggcttcgacgtcggtgtcggagctgccggtcgagcccggggagacagacttgcgcaggcggaggacgtgcgagctgaaggcggcgtgcggctggccgacatagcgaaggacgatgttggcgccgcctggggcagacgatggacgcaggcagcttcagtagcgcccaagcaggaaaggttgccaccttaaagcagcgcaccctcagaaagataggcccagtcagaaggggtcgtcatgctcgccgtcaggaggacgaaagcaaaggccatcgctgcgcggacgtttgctcggccggcggtttggagggagcgagctttcccccttgaacgtcaacactcgctctctcactaagctcgtctcagtctaacctctctcgccatggtcgtcagtccatggcctgcttgatgctgtgcctgtatgagccaaggctgactcgtcacaacttatctgggtgcccctgtcggcgacccctcgagcagaagctcaccctctgccttaaggccacgctcgacaacgtcacgtcgctccagcctcagtcggagcagcacgagtttcacttccgtgtccagtgctcgagctgtcacgaggagcaccccaacacggtgcccgtcaaccagcaggtgagtcagagtgtagcttgagggggcttcgtctcgctgggctgtcgttcagggcaccctaggtcggcggcacgccgccgcaccctcttcaccgttgcacgggcgattgcttgctgaacccaaacgcttcgctcgatgccgcgtctacaggaggagcacgacatgtctggctcgcgaggctcggcgtccttcgtctggcgatgctcattttgcaaggtgcgccttccgcgcagcgtcccgagctcgaagctagcctggcactgatgcccttttcgctgatgctcctgtggtgcagcgcgagtcaacgctgtccttcctcccgctgatcatcccgtcgtcgctgctgggatcgacaaagggcaaaaaggcaaagaacacggccgcaccgacgtcgaccgcgccggcgccgattgttgagagcgagacgtggacgccgtttctgaccgtcgagtgccggggtctcgagacgatcggcttcgagtgggatgtaagtcctctctgatcggtcctcatctccacaagctcggttgccggcttcctgttcgctgaccctggctgagaccctccgcgcgctgctcctcagggccagtggaaggcacaggtgcccgattcggacgccaagttcgactcgatcgagttcgaggacggccgttgggacgaatacgacgagggctcatcgctgccagtctcgatcgaggagcttgagagcaagtggatgaaggtttagcctggacccggctttgcttcctcggtgcgcgcatcaacgcgagagggctacggccttatcttctctcgtcacgctggactagcgtacgtcccgctgggatgcctcttatgttctctttgctgacatgtcgcagtgcgctacgctttccggatgcgccggtcccttcactttctccccgatcctctgttcctttgtgcgggcttgctcgagttgaggttgctcgaggagagccttttcgagagcagctgagtgcgggtcggtatcgatctaaaccattgcatagagcgagcgaaggggtacaggcgaggggaaacaagcaaagggacagtgagcggatcgagaggttgctagggtgcgagtacggcaaggtgcaaggagataaagaggcagagcccgaaaaaagagggagaagggagaatgaccgtctagagcagtctacttggtgaggacccagagggcgttgccgccgccgcactgctccttgtcgttgcctgggcaggcctggtcacacgaggtcgacttggggccgctcaggctgacgccggaggcgcagtagcactctggaaggcggggcggagcgagagaggaggtcagccggatgcactcgggcggtcgcagggcgaggaacgaggctgcgcaccggagccgtactcaacaccggcctgggtgaagcccttgctgttgcagtactagttcgaggaagggaggaggacaggcgtcagaaggcggcactcgtccttacatccatcggagcaggtcggactcacgttcgtgcatatcgtctgggtcatgccggcgtccgtgagcgaggcgccgttgaagagccggccgttctggttgtcgagcagctgcaggggaggtgggaggagggccgtcagccggcgaagcacgcgattcagagaaagccgtcatggtaaggacgcacgcagagcttgttctgcttccagccgttgacagtcgcggccgtcttggcgaccgacgacttgaagatcatgagagcctggccgccgccgcagaacttggacgagtcgccggcacaggctgcagacaggtcgaccagcgggtcagtcgatggccgcgagcgagaggagagcaaagagccaggacgcactcgacaggcactggtgcgaggggttctcaaccgagacgtagtcgtcgcagtagcactctgcagggtgcaaagaaggaaggggaactgtcggcagatgcgagagaggcccgcgaggctacgagggcaagaggagtcggacgcaccccggccgaactcgacaccagcgaccgagaagccggcattggcgcaatctgcaggggaagaacgagggcaagtcagacgggtcggcatcgggggcgatcgacgaccggagaaggagggtgactaacgcgtgctgcacttgtcgtaggtcatgccgtccgacttgaaggagcagcccttgaggaggcggctgtcgatctcggcgactgaaggagggtggagggattgacgtcagcgtgtgactcggcagagccagcgcgaggcccgagagagactcactgcaggcgccgttcgagtggtagccgttcgagtcggccggagggcgctggtcgccgccgtagacgacggtcgggctgggcgcaggcgcctggatcgagaccgaggtggtgggcaccagcgccgggaccgagaccgagatcgtcggcgcaggggccttgattgaggtcgacttgggcgcgcagtcggcgttggcccggttgatgcactggttgtactggttggtgcagtcgctcgtcgtgtggccccaccagacgagccaggaccgggtgacggcgacggcgttgcagagcgtccgctgcttggtacacgagtaggtgagagccgggaggaggctgacaaacgtctgagtctcgcacgtgtacttgctggtgtcgtacttgtaggtgtaaacagccgggcaggtcttgccgccgagcgaaccctgccagttctgccagttgaagttgaagtcgaagatgccatcgatgatgtcgccgatgaagccgagcgtccgcttgtcgaggtcagcgtcctgtgaggcgggcgcgggcgcggcgacggcgagcgaggcgagcgagagggcgggaaggaggagggcgacgcgcatgatgaaggacgatggaggagggcttgggtggcgaggtgttgggatggagaggtgtgaggtgaggggaattgtgtggagaaagtacgacaagcctggtgagccttgcctttataggcatcagctcggctaccttgaagacttgagaaggccggacgcccgccaaggatgccctgcttgtcccgcagatgctcgctcccccgcctctgcggtctcgaccgtcggccggccagcccgagggttgacgaacaagcactttggcagccgtctttgtacgcgttagccctgccagtagacggttagcgggcgtagaaagaggcatgggggggtcgcccgtgccgagacgtgtctcgacgggtcgacggggagggatgccaggtcgaggtcgacgaggcggaggcgttcgtcgacgcccgccgggatggcccgcgggcgggcaacggaggtaaaatacaataaaaagcctcctgcgcaagcatgtcggcgggcctcgactttggcaacggccggcagcgacctctcatcgatcttgcagcgagcaggacggcgaagcctctctcggccgctgccctcccgtgcatatcagccctgccagccaccagcctgcgggctcgagctcccattcccgccgacgggcaggccgtcttttgtcctggcaccgctgaccggagctgatttcgacttgcacgccaaatggcagctcggccctccctcttgcggcgttcagaggctcgggaatgacttgcgcacagctgggcgacgtatcgctgcgtgggtagcggctgctgacctgcccgagcctgtctcccttctccgcccggccccgagtttgaggctcttgccgtccctctatcccctctactgcccgcctggcccttgacggctccgccctttcgcccgcgtcccgcacttgggccgtcgggctgcgtaatatctgcttgtcgctggcagcttgatgaggtgtcgtcgaagcgcagcgcaacaacgctcctgctcagtctcgcccggccatcagttgctgtcggaagtgaccctcaatgccttgccaggcgcgctgtctcccaaatgacgggccaagaatgtgcacagagacgccatctggcagctcgggttcagatcgaggagttggactttccccgctcgcaggaaattggtcgtctcatgagccatcgagcaaaagagggtaagtagaccctcgcagggggtgaaaaaatgacaatgagagtttcgcgtgtgtccggcgtgggcttggtcgagccccgagggtggcccgacaaggtaaaggggaatggggggtctactacaagcatctgagtctccgaatctacgtctgctctaccgaaggagcgagcacggccttgcgtgtgcctcccattgctagcgagccgtcaaggcgcgccgtgtcgaagaaagcgagaggagtgcgtcgccctctacttctgcttggcgtcgaccagggtctcgacgccgtcgacgccagagtcgctgacggcaccgctgttgcccttgaagacgccaatcttcttggcggtgccagaccgcgacttgtaaaagatgacgtccttgccctcgtcgacgaaggcgcagtcgcggaactgtgatcacaagggtcaggtcatgtcaacaaggggcctcgaccagagtttgactcgaccacgcacgttgcggtaaaggtcaaccaggaagtggccgtcccgccactggtagtgggggccgaggaactccttaagagcctctgtcgccttccaggcgttgtagtgcggaatctttgacgagacgtggtgcgagacgtgagtctcgcagatgccgtggagcatgtgcgggccgacccagccgaggcaattgcggtcgatggtagcaagcgcgccctgatgatcggaagccagttggatcagcgttggccgtcgcagctattctgctagagttggaagaagactcacagtggcaaaggtccaggtgtcgttgctgcaggagggaagttggcgagtatgagcgtcagcacggcggagcaggagacgcaggcgagagggaaacgcacgagtagtgggggacgagcgggtcggtgtgctggaggaacgtgatcgagacgagccagtggttaacccagactgaatcgagtgaggaaagggtataaagtcagcctcgaagcagcgcgtacgggggtcgtgtgaggtcggagacgcacggtaagggatcaagtaatacttgacaacctcggtaaagccgcgctggtagccccacgtgccgagagcgccgaacagaagcgcgatgccgatgtcggaggcgatgatctgccgaaagtgacgcttgtcaaagatgacggacgtcgggttgaagtggttcgtgaagcgcgggtaggtcttctggcccgaggcattgcggattaggtacatcggccagccgaggagctgcgaggaagaaggcaggggtcggcagttagcaaaggcgacctcgaaccgacgaaaacgcagcgaggacgcacctgctgggcgaggaggttggcaagcacgtagaggggtgcgtcaccgatagcctcccggagctcctgctggcgctcagccgtgacgttgaagccgtcctggtcctcgcgctccttgtccatcgtcgggaagcgctaaggagtggcagggagaaggtcagttgaaggagagcctcggtcaaacagctgctcgcatcgggccggcagaccggagaacgtacgtgctgctcgcgcgtgcgcggaacaaagacctcatcgcggtgaatgtgaccggtcgcggcgtggtgccggccatgcgagatgcgccaggagtggtacgggacgccgagagccgagtggaggacccatccaacggcgttgttgatcgtcttgctctcggagaaaccctgatgaccgcactcatgagcgatgacccagaggccggtgccggcgaggccggtccagaaccaaaagacgttccagagggcgaacgtgagagccttcgagccgtggtgaccaaagccgctataacgtgggccggggagccaggtcagatcggccggatctgcgaaatcaggctcaagatcgcaaacaacgtacgagagcgaaacgagcgttgggatttgctgcgcaaaggcaaggccggctgcgatgaagatgaggtcctggacgctggaggaggaaaaggtcggcgaaagtcgatccgtcgatgtcggagggaagattgaacaaggacgaaggggcaggaaggcaccaaggtcagcgatcgaagaggtcgatgacaagcatcggcgccgcgacgtacatgtagagcgacgagtgcagggcagaccgctcaaagcactctttcctgtgataggaagaaggccgggcgaggtcagctccgagcttgccgagacccgaagcgcccgacatccttggcgcgtcccattgggccaggacccgccggcagattgctgcaaggcccgcaacgggcggcgacaacgagcgagcgccgaaatgaccggcatgctcttgagatcagaggtggacgtacggaatcgcctgcaggagcctggcggaggaagggaagacggaagaagcgggtggtcagatccggtcggtggcgacaagcgctgggggagggcgcagggacgcactgcttgacggtgaattcgggcacgatgaagcgagcctcctcggtgttctccatgtcggtcacctgagccggctgcgtcgtcttctcggtctgagcggacatcttgaagaagggaagggagaaggagaagggaggaatctggaggggacgaaggtcttggggcagggaataaggccggccgccagccggctcggagggaccacaattctgcctccgaccgatttcggaggcaacgagcctcggcccgccgccgcggcgacgacagcagcagcaacagcacgcaccagtcgaccagccagtacccgtcgccgactctcctcccacgctacccgctcctctctcgcctgctctcgtcgccatgggactgctcaacggaacgaacggctcggccccagccatgacgcctctcgacgtgcgtcccctcgctgctcctgctctgatagggccgcctctcacgcgactgcgagcctgacgacccgactcgtttccgtctctgtccggcttgcttctgtcctcgtcgctcttcctcgactcgacggccatctgcctcacgctcgacagccctcgcgtctcaagatcacaccgcacccttcgccgtcgacgctcccggacggcccgctcgtctggggcgcgtccttctcggaccacatgctcaccgtccagcacatcccgggcgagggctggcaggcgcccgagatcaggccgttcgccaaccttgagcttcacccggcgagcgctgtcctccactatgcgccttgtcttttcgaaggtacgtcctttgccccctcttgatcctgcccgagccggtcacgcgctcgcggcgaggcgagtcaggtgaaccagggtgctgactcaatgcacgatgacctgactgcgctctttgccgcggcccgcctgaccatcctgcaggcatgaaggcctacaagcccgagggcggcgagccggcgctgttccggcccgacatgaacatggcacgcatgaaccggtcggctgcgcgcatcggtctgccggtgagtgagcacgaatgttggcccgctgcgcgaccttgcgtcgatgctcacccgacatccggccttctgcagacgttcgaccacgaggcgctcatctcgctcatcatgtcgctcgtcaagactgacgagcggttcatcccgccgccgccatactcgtgcgtcgcgccgttcgacctgcttgacaccccttgactgacgcgcgcaatgacgcgcgtcttcctcaaggctttacatccggccgacgatgatcggcacacggcctgcgcttggtgttggaggtccgtctctgcacctctcagctcgcccattgctgccgtcatctgtcgaagtccgacggctgatgtgcttctcttgatacctgcccgcagcgagcgatcactgcctgctctatgtcattatgagccccgtcggacccttctttgccgagggcttcaagccggtttcgctcctcgcgacggtagacgacgtccggtcttggcctggaggtgcgtagagacctttgacggagccgcttgtcatcagtcgctgacctcgtcgcgtcgcctcaggcaccggccagttcaagctcggcgccaactatgccccttgctttacgccgcagaagaaggctcaggttcagggctaccagcagaacctctggattctcaagaacgagctcggcgcgacggtgacggaggcgggccagatgaacgtctttattgcccacaaggacgaggccggaggtcggtcgactttgacctgcacctcgccggcgaggcattcttcatactgatggctgaactctccctcctcttcgcagcgacgcacctcataaccccgccgctgaacggccagatcctgcccggcgtgacgcgcgactcgctcctgacgctcgcccgcgcccatgccgccgggtcgatcgccctcgccggctttccttcgtcagggctcgttgtcgaggagcgcgagtttacgctcgatgacctaaaggcctggtcggcctcgggctcgctgctcgagtgctttggtgccggcacggccgccgtcctccagccgatctcgcgcatcggcattccggacgccaagggcgagatcgtcgacatctacatccccgtaggcgaggccggtatcggaccgatcgccgagagcctgcaccagcgcatgagtgccattcagacgggcaccgtcgagggaccggctggctggaaggtcctctgccactagaggggcggctgaggcgatggagaggatctgacggcgcagcgcagaccggcgcctttatcttgcatgcacatctagaggctgcgtgcgagctgtcggttggcatactaattagaggcgagatcttcccgcaaagcgacatgcatggtgcaaggggagtgcctgcgcgtcatcgagctgcggcggctccgagcctgcttgctgcctccgagcttgagcctcagcatggccgactacttgagcagccctcgcctttaccgcaccttctgctacccaacgagccatggcgccgcatctgaagcagctcttgcactcggactcggagacgctcgaccttcctgggccggcctgcaacccaagcgagctcgccctcctggactttcacacgctcgcccagctcgccggcgcgaccctctttggctgcctcgcacggatagggatcgtcgcgctcttcaccggctcgaatcagagcgccttccccgtcatctgggcacaagcattgggctgctggctcttcgtacgtcgaatctcgcgccactggcagatcctgttggacggagaggagagggctgaccgacagggctcgtttgcccccgcagggcctcgtcgtgcaccgccgggaagacatcattgcctactcgccgcagctctacgtcgccgcccgagtcggtcagtctaaagagcgctcgctcgggaccatgagacgcgattgaagagctcctgtgcatccccaggcttcgccggctcaattgcaactttcgcctcgtgggagaaccagagcttccaggcggtcagcggcttcaaggctcccgagcgcctctggctgcataatgtctgtcctccgtctgctcgtccgcccgtgccccgaggtcgctgaccagaccgagatgctgcgagctcttcaggcgaccgacttcatctcgcaggtgctcgtgacactcgccgttgccttcttctcgatgcacttcggcgcgcaccttcactcgcactttcccttccggccgacccggcacgcgatccatcgccggacgcaatggatcctatcggccgtcagccttcttctctggctcaccgtcctcttgacatttgtcctctcgccgtacgactggcggaccggccgtcgagtgtcgctctcgcttgtcgtcgcacccccagcgacgtggatccgctggtggctcgccgcctacctcaaccctcggagcccagagtggatcaagtggggcacgtttgcgagcaacatgctctcgacgagcatccttgcgacctcggtcctgctccagttcacgctgccgacggccaaatcgatcctcctccagtgccaggccttgcagtccctccaggacggcttttcgggctgcctctcgacgattccggtgcgtgaggcgcagatccataggccaagtcgttcgccagctgacccttcttcttctcccccttcttcctttctcacgcgcgccaggccttcctcgaacatgctgaggtcatggaccggcgcgagacccggcgctggtacgcctggacgtacattgccggcatgtacctcggcggcctgctctgcgtcgttctgatcctcggcgtcggctggtggacgacgcgcttcgaggtcgacgctcagtgcgtctactagacggctacctccctgctttaaacccttatcatcactctcatctcgcaacctgtactcgcacttgctgcgcactctcggctttcacactcgcaatctgtatctcgatggatcacctcttgtctctctttctttctccgagtggctcatcgatgcgtccggcacaggttcaacgcttccggctcaccggcaagccgcgagtcgccgggcccgcccgacgacgacccagagatcgacccgacccttgaccttcttacccctctactgccccggtcatgtctgccatggtcgacaagggcccttcaaacgcgctcgccaagctcaactcgcaggttggctcaagccggcacgctcaaggcgtgagttgctctccttccgcccctccgtcgttgccggctggctcgtgctcctcgcgcgaccggccggcccaccctcgaccagcagctgacacaagtgttgctcctgctcaggacctcttcactcggccaggcagctcaagccagtcgtcaggctttcggacggcgagacagcctccgacgcagcgcgagcagaagcagcagccagagcaggtcgcctcgcagcaccaccaccagcaccatcagcagctgtggcagctgccgagtcagcccgcctaccgtcttgcccaaggtcaagccagcccttcggctcaagccttctcacaggaaatcaatccccagcatacaaactgggcggtcgattatcatgcgcaagcgcccgtggcgatgagccagccccatgccggccagcagcagcagcaccagcagaacgctcagggctacgctcagggctacgcccagtcgtcggcattgtcgtaccagggcttccgaccgatgccgagcttcgcaccagctgcctgtacgtgacgcctggactttctacaccgacgcactacgagactgacccgctgctcgcttgcacgcagatcggccctttgtcccctccgattccgcgcaggtcgcgcagaagccatcgcactcggccgcgccgacttacgccgctccgacgcccgaggtcacatcttcaagcctcgcccagactgcctccttgctcgtcgatgcgacctcggaccgcagcgcgctcgaccaggagacggccgagaagcttcgctcgagcgacttcatggcgctcatgcgcgactttgccgagggccggaaggacgtccacggcgaggaggtcgtcgacgcccggatccgcgagggctgggcgagttcgcgcgagggtgacgagggctgggcccaggacttctcgcgcggtggcaagagcaaggcgcgcgacctgagcggtgcgctcgaggatctctcgctcagcggtcgcgcttctccaggccggtcggtccactttttgcccgatatcgcctcgccctacacgacgatgtccgacgccgagctccgcgcggcgactgcgatcccggcggcatcctcgatgcgctgggaggaggacatgaacgacgaccaggctcaggaggccttcctcttttacaacggcccgccgcaggcacagcagcggaaccacaccgcgatcaacgaccgcgagggccaagtcgatggtctctcgctcgatgtcggacagactccatcctacgtcttccagaaggccaatccgtggcaggatgaacgctttgcgcaggctcagcgggcagcggcgctcgacgcagacagccaggtgcgcttccttgcctgctgttggcacgaccctcagctgacggacgctcctgctccaaaacagtccgtcttgcagcaagaggccaaggtgctgcagaacccgggcgacgcccatgcctggctcgagcttgggatcaagcagcaggagaacgaggtgcgcctccgtctcccggagggggatggacacagcggccggctttgttgacagcgcgacttctcctgaacccttctcttcccagcgcgagcaagaggcgatctcggccctggaccgaagcattgccatcgatccggccctgtcgcaggcttacctctcgcttgctgtctcgcacaccaacaactcggacccggcggcgacgttccgggcgctcgaagcctggatcgaaagtcgctcacggacagcatctggcccgtacgtgggtgtcctcgaccgctgggagcagcagaccggcctcgaccagccggcccgtgcggcgctgccgatgaaggacatggaggactggctgtcgggcgcgctgattgagatggtaaaagccggcatcgagctcggcaacgatgtcgatggcgacctgcaggtcgcgctcggcgttcttttcaatacaagcggcgtgcgttgtgttgcggctcgtctacctgctgcctgcgcgtaactgacttgccgatctatttatgaccgcttcaggcctacagccaggcccaggactgctttcgaacggccctggccgtccgaccagacgtgcgtcgaccattctccttctggcatgggtgctcgggtccctttgcttatcttttggccctcaacaggactaccaactgtacaaccgcctcggtgcgacgctcgcaaagtgggtccctctcccccctttcccgtatctcagcagtgaccagcgtcgatactgacgcctgcactcgctctgtcacagcggtggcaaggcagacgaagcatacgagctctactggcgagcactcgagctccggccaggcttcgttcgtgcgaggtgagagtcggcccctgccttcgtctgctggactactactgacttagcgcgtcaggttcaatctcggcatctcttgcatcaacctgaaggtgtgtcgactcctgcatgcagttcgtacttcgtccaacgtcttccattttgctgaccaactggctaatcgcagcgttacgaggaggcggccgagcacgtcctgacggccctccggctgcagcagaatgactctgcgtccagcaatagcaagcccatcgtaggcagcgccacgctttgggacacgtacgttttcccaagccgtctgctcgtcatcttccactcgatgactgactgcggccctgcccgaccctgatcaggctgcgtaacgcctgcgcctacatgcaccggcctgacctcgtcggcctctgccaagcccgcgaccttggcggctttgagggcatcgacttcacagaaggcggctcctggaacgagcgcagctgagtggcgtcagcaagggcgggggggggggaggggggcgagggatcgacaatggatttgaccgtgctccccgtcttgaccttgcacagtcaagcaagagacgagaacctgacgacggcgcggatgggccgtgagggaggcaacagctgttgtactgtcggctcctccagctcaaccgcagcagcttcgccatgcgttcgaccgctcgacttaaacaaagctcgcttgccctcccaggacatggctgcgcctctacatcaccctccgacggcgtcgcagccggcgcagcaaggtaccgccagctcgacccagcagccggccactctcacatcgcctgaggatgttgccagcggcgaagcagcgcacctcggcagcaagcgcagagtcaaggacgagctcgaggatgaggcgggtcggcgggataagcgttgagcccggccgaccgcaattctacgacttttacgacatcagtcgcctgcttccctcatcagcgatcctcgtgagcctctgctgggctcagcagacgcgctgttaggcaccgacgtttgcagtgcgtgtgccgggcgcagtaacccgactggcatgacgttgccatggcacagtcgccctccaatttcgacgaggagcgtctgcgcccgccataaatgagcgcttgccgactcgttgcctttgaaccccattcgtaaattcgcttagccaaccaaagccccctatccgcaacctctatgacgggcgggacatggagccgagcgtagacgcggacacgccgacaggtctaaaaaatgtgggacctcgccgggccttcgggcgccgaatagaggcccttcttcgctggcctgcgaaagctctcctctctgtacccctcctctcttcgcattgagctacctctcgataatggcctttgcccactcatcttcttctgcactggtctcgtcaggatcgtcaggagccgctgacgacccgccggccgagcttagcttgagagagaccttcaagctcgacgcgacagcacgcgcgccatgcccgctctgaccgccgaacgcctagctgccagctttttcaagcagcgtcaaggcagctcgggcggaagtcatattagaagctggcccactcgaggctgtagaagtctgcctcgcccgtctcgtcgtcccagccggcaatcaggtgcgcctttttggtcgccgtcccgagccggccccaagcgacgagctccatcggcgtgatgcgatggtcggccgagagcactgcggtcgacgagaagtgcgagtggtagcgcagagggtcgcctgagggggttggaagaacgcaaggctttcgtcaggaggagcgagcaaccaggcgctttgcctctcgccgcgaacagcaaatgcacgcacctggatagacgagcaagtctccgccaaacttgatgcccgcgcccatgaagtagccgcgctcccagagcgctcgaaagacgcctgccctagctcgctcggcggccgtcgaagggtaggaccagacttcggctgcgcgggcggccgcgagtgtcgagtaggtgaccagactcgggtcgtagtaggcgtgcgacgccgagtcggtctcgatggcgatcgtgtagctctgcagaggctgaggggccgccgccgtcgttgtctccttggccgacggtgctgcgacgtgcacgaggtcttcctcggacccaggcccgtcaccggctgtcgctgccgccgcctctgctgctcgccgtcgacgctcctcctcctcagccgccttggccttgcgagcagccatcttggccagctgagcctcgctcttcgggatcgcctcgagctgggcgcgccgtgcagcctcggccacctcgcctgcccgctgctgggccgccatgtcgtccaggatggccgacgtttcgagctcgagctcagccgccgtcggctggcgcaccgagcgcacgtcgtcgatgatgtcggcgatgcctgcacgcaaatgtggtcagcacgacgtcactgccacactctcgtgtgacacgtcaacgcaccgttctcgaccagcaggacgacctcctcgggcaggagcaggagcggcaggccgagaaacatgttctgctgagtgatgccgggcagggtgcccgtcaagacgccgcagatgtggtggttgacccggagctggcgcatcgcctcgaccgaccagatgtaggccttcttgttggcgacatggatcgggatccgggagcaggaagagggaggggtcgtcgagtccatgctgggcacgcgcggaggtcggccggtcgggctgcggaacgcgagagggaagtccgtctcgtctcgagctggttctgcggggggttcttacgacgatgcgaagagggcgacgacaggtctggtagaggtcgatggccttgtcgagagcgaggttgtcagggtcggtgttgaggggggcggctcggaggccaggagggtcagctaggcgacttccgaccttgccctcaaccgccatcatcccgtctagcgtcctcccaccaaagcaagtgctatcaccttccgctcaaggatgcactcggaacaagacgtgttctcctaccccggcggcctgccgtacgacgagggtcaggccgtacccttgccgtcccgctcgctcgccgacaggctccgcagagagctgccgaccgccgccgccgtgtctgccgctgctgtcgacgacattgaccggccgctcgacgagctcatcgatgagcgcgcaccacggcgggggaatggcgtccgcggccgtggaatgcggtcggacggcgagctcgagtacgtgcctcagccggggggcgagcggcggcaacggtcgccgccgacgcagaagctgtatctcctgggcgaggtcgacgccgtcatccaccacaagatggtacgttgacgcttggcaagctgcctgagcgctgtatcagtctgacgggacttccctcactgcggtggcaggcatccgacctgctggacagctcagagacggcgacgacggacgacccgtcgaccctgccgcagccaccggcggacgaccctctcgtccggacgaacgcactctactttgaaggccagccgttgaccgaggttcgttcagagaccagcgctgaacagttcgtagtcaccggctgactggctctgcataccttcagctgcccaccgacaaagtgttctcgtgcgtgtcttggcggcaagaggttcttccccgatgccgccggtctgaccttttccgtcctgactttccgcaggtacatctcatccttctcgacgagccttcccctcggcgtcgagtggatcagtgacgagcggctcgtcgtcgtcttcccctccaagctgtcggccgcctctgcgctgaacgcacttctggccgacgcaacctcgccggccgtcctctctgacctgtcaacgagcacgccgacttcaacctcgagcgcctttgactcggagctgccgacggccgaggtgcacgctgtgccgacgcacctatggccagtcaccctccggcccgccgctacccgactgcgcatggatgcggacgacggcggggcgccggacccaagtgatggcggcgtgatgaaagcccggcttgggatccgatgggcgcggttgaacgacaagaagctcggcaggaaggtgcgcgcagctcatgtccccggtcccaggtctcgttcctcgcatgagctgacgacccgccctgctttcccttcatctggctttgcagagcacaacgtctggcttctacaagaagtacggcatgacggctggcaagcccaagaatgcgcccgagcagttcccggaggacatcatgtcgtcctcgttcgactttgaccgcgactcgcgcagccgcggtgcgtcctcggccggccgctggcagactcgcgagcggtcggcctcgcccgtcggtcgcgatcctcggacgctcgctcggccgatgcgccgctctgcctcgcctggcggtgagggcgaccgccgaagcgtccgcgggcgcggcatgcggtcggaccagctggccgacctcgatgcagacctggacggcctcagccggggcgaacgcggcgacagcgaaacccggcacgaggctagcagcggtcgcggcagtggcggacggggcgagcgtcgtccccagcgcgagagcggtggcggcggtcggcggactgagcagagaccgaagcgcgacgcggacgacctcgaccgggagctcgagcagttcctggcgcaacggacggagtaggcgtgctggaccatgtccattcgattctgtcctgcatctggtccggatgaccagcgcaagaagggcgtgatactgcgcacacggcagtgtgaggccctcggcggtcgacagtcgctagacttgtagcctgtgtcatctcgacggagtgtctgaccctaacaacgggcgacgacttcgacgcgtcttggcctggtctgtcgacggcgtgcgagggagactgctccggcttggacctgcagggagtaggggcacgttcagtcagtgcatgcgacaaaccagcctcaccaagccaagggacgcacgacgggcctgagctcgagagcgccttcggcaaaggtgaaggcggtctggcagctagcgcggaccgtactcgtgccagacgacgagcgtccagaccgcccaaccaacgacgagcagggccacccgccagccgactgcgtcttcggcctccgctgctgctcgacccttcgacccggccgacgggacccgatcttcaatgacgtagatccgatcgccttgctcgcgaacgacgcgtccgccgagagtccggtcgtagtctgggagctcgatgcgctcgacgtagagcatctggacgagggggggaggcggagttcgtttacgaggtcgactgggaggcaggtgaggtcgcgtcggaagccggcccgggaggaagagaagcctcgcggatcgacagcggccagaggtagtgtcgccagaactttcccggggtgaatcggcgagctagtgtacaggcaaaagggcgggcgtcggtcgtggttgaggctgaccggcaggaggaggtcgggagccggagccgtctctctgtcccgcggcgacgagcgacggctgcagagggtcgggcgagttgggctgcgagtcatcgctcctctcgacgaccattttcgacgccacctcctttcttacgagtacgtcgcgctcgtcgatggtagattaagggtagcgcgtagaactgatgcacgtgccggtcgacctacagcttgtccgccatggctgcccgagctcttgccgccctccgccagacggttcgcccgacggcgtcgttccgcatcgcgtcactgcccacctcgagggcatacgcctctgccatcacgcaggacccgatgacgggcgagttctcgtcggcgccagacatcgatgtgagtccactcggcaggatcatggcgggcaagagggagggctgatcgcagctgcgacgctggttgcctctccccgtacctcagcccaagcagctccaggtgatcaagagcaccagccccaagaagccgccgccgagtaacaagctcgtctttggccagacgtttaccgaccacatgcttacgatcccctggaatagccagaagggctggggggcgcccgtcatccggccgtgtgcgtgatgaccgaccctcctcttcgaccgaagcgtctgaaagcgcggcgcaagctaacttcccctcctctgcagacggtcctctggcgctcgacccttcttcgacggtcctgcactacgctatcacgctgtcagtagcggaggccgactgcgttcgtcgcagcacttacgaggcgcccacttaccctcacgcgtgcgctccttgccagcttcgagggcatgaaggcctaccgctgtgacgacggcaccgtccgactcttccgcccggacaagaacatggcgcggatgaacactgcgagtggccttcttgaggtggccttttgagaggtttgtctcgctgccagtgctcaccggccccctttgcccccctcgctcacagagcgccgagcggatcgcgctgccgaccttcgacggcgacgccctctcggacctgatccagaagctcgtcatgatggactcgcactggattccgtccgaggctggccactcgctctacatccggccgacgatgatcggcacccagaacgcgctcggcgtcggacccgctgctgacgcgctcctctttgtcatctgctgtccggtcggcccctactaccctagtctgtcctgaagatgaagaggcagccgtgcacgggcccatcaactgaccgttatctctcgtgatcagctggcttcaagcccgtctcgctcctcgcgacgtcgcactatacccgggccggtcccggcggtaccggtggcttcaagctcggagccaactacgcgcccggcgtcgtcccgcaggtcgaggccgccaaggaaggctactcgcagaacctctggctcatcggcgagaaccacctcctgaccgaggttggtacgatggtgcgtccgagcgcgtcgacaggccgagatgttcgtcgcacaagctgacctctgctcgtttgacacggcagaacatgtttgttgtcctcaagaacgcgcagggccagatcgaggtcgtgacgccgccgcttcaggacatcatcctccccggcgtcacgcgcgactcgatcctgacgctcctccgcgagcacgccgagggcaagacggagctacctggcctgtccaagaacattgtcgtcgtcgagcgcgagattggcatgaaggaagtcgaggatgcccagaagagcggcaacctcgtcgagatgtttggctcgggcacggccgcgctcgtcagcccggtcgacaagtgcgtcctgccgccttcgatgggaccgtccgtcattgttcgacgggcctgactccctccttgccctcttcgcagcatcggcttccagggccgcgacatccctgtcccgacgggccccaagggcctcggcaaggtcgccgaggccgtactcaaccggatcgtcggcatccagatgggcaagatcccgagcccgtggtccgtcattgccaagcagtaaagagcgaggccctagagcacgacagagcggcttgatttttgtatggaacttatcttgaaccgtagtgcgacatctatcgccttttagtcggcgtctattcctcgccccgcccgcgccaggcgttgagcgcgcccttgccctgctcgatgacgcgaacgatgttctgtccaaacagctcaaagccgcgcgtatggtagtcctcagacactgggagggcgggtcaaggtcagtcagcgtgcgcgcgagaagccgcaacaagaccagcgcaaaggacgaactgccgctcatgtggggcgtcagaatgacgtttggcagacggtaaagcggcgagtcggacggcagcggctcgggcgtcgtcacgtccatgctggcggcgccaatctggaagttgccggtcgtcgcctcgtcctttggcgctcggcggtagatggccgagggcgagccggcctggagagcggagatgagcgcgtcctggtcgacagtgtcgccccggccaatgttgacaaagacggccgtgtccttcatggaccggaaggccgactcgtcgacgaagccaatcgtcccggctgacgacggcagcgtgttgacgacgacgtccgacgatgagtagaaatcgtgcatcgcctcttttgagcccgtcgcgaaccatgccgaggggatgtctgacggtgcggccggagccttgagttcagcagccaaacgatgacaggtgaagtggctgcagatcgaacgcacctccgtcgtggtcgcccgtgccctcgacgaggaagccgccgatgccagtcttcttgccgctccgcgtcgccgcagctacgtccataccatgcgccttgagcagtcgagcaatctcccgcccgatgtggccgtagccgagcacgccgacccgccggccacggagctcgcggatgccaaactgctcggcgttcaggacttgcccctgcgagatccaacggctctcgttccgcgacgagaggatgaagcgcgggagagagtggtagagcgagagtgtgacggcaacgacgtgctcggcaatgacaacctagaggtgccgaagtcagctcattgacgctcgaaagcacgtcgggctgggcgacgcacgacgtggatgccggaagcgttcgcgcagatgagcttgttctctttcgggaacgacttgtagtacggcgtcgcctcgtagtgagaaaaaccagcactgctgagctggatcagcttgagcttgggcgtctgctctgcgttcgatctgcgagaaggaggtcagcctgggctgcgcctcgagctgaggggtgtaggagagcccagggaccgacacgttgctaggaggcacaaagccatagagtgcgacggtgtccttgagctcctctccggtaggcgggtcgtctcggtccggccggtggacgacggtatagcccttgaacttggcctgaagctctgagaggagctgccagtagaaagaagggaagacggtgagtcgtgcgatctcctgtaacagacaacgcccggacagacccagtcaggatagatagtcgccacgacgagaatagtaccgctgctcatgtcgttgtagagtaagggtctcggcaaagtagaaggagagaggagagagcgtccaaggtcgtcgtcgtcggaggggcttgacgacggccaagcgcagccggcagccgctcttcgaccgcgtgctcggccatcgccgccgccccgacggaacgagcgcttcgcacaatcctacacaaaagagcgacgagcaacttgcacctggcatgagcgagagatgagggtgtcgcgtagacatgctatcgtctccctccctgtctattcgatcctcgcttaaaagaaccccctagctggtgccgcgctctcaaaggtacttcactgagtcggcaaactcgcacagctgcttgcgcgtgccttcctctttggccgagtgacctgcaaaggtcgacagatgggatttaggtcagctcagtcttacggaggcgatgcgcaaaggcgagattgacgaacctgcgtcgggaatgatgacgagctccgactgttccaatacgggggccagcgtcagaagggcgtcagcctgagtgacgagtacgagcaggcaatgtctggcgcacctcagggaaggccttcttgaggtcccaggcgctgcggagcgggcagacgacgtcgtaccggccctgggcgacctttgttggaatatgccggatgaggtcgatcgactgcttctcgagcagctggccgtcgcgcatccagccgccattgacaaagtagtggcactcgatccgggcaaaggcgtttgcccagtcatccgactcggcgcggtcgaggtcggcctggctgacgcgcaagcgcgaggtcgacatctcccactttgaccacgcccggccggccgtcagccggacctcgtcgtcgtccgacgtcagccgcttgtagtaggcagccatcatgtcgccgcgctcctcgacggggatcggtgcaaggtagtcgtcaaaggcgtcggcaaacaaatggctcgtgccgtcctggtaaaagaactcgagctcggaccggcgcagggtaaagatgccgcggagaatcagggccttaacgttgtcagggtgcgtctgcgcgtaggcgagcgagagcgtcgaaccccacgagccgccgaagacgacccacttgtcgatgccgagctcctcgcgcaggcgctcaatgtcggcgacgaggtcccaggtggtgttctccttgagctcggccataggcgtgctcttgccggcgccacgctggtccactgaacgcacacgcgcggttcgcgtcgaggcagtggtcggtcagcgccggctgtgcgttaaaaggaagaacggtacctggaagacgcactgatgacgatccggtagacctctgggtcaaagtagacgcagtcggaccgcgacgagccgcctccgggtcctccgtggctaaggagaaaggatacagtcagtgattgggctcgagaggacagctgtaggcgtcggagggagcgagcgcacaggaagatgacgggctggccagacggcagaagggtcagcttgcaacgccgtggagcacagagagagagaaggccatcatgctcaccttgccgtccttcttgcccgactcttcatagctgattgacgcaagacgagggtcaggtccggtagaggctaggtgctcgggctcaggcgccgacgacggtcaccttcgaggcagcgctcgccgaggttggagacggcaacgcactagatcgagtgcagttccgagaccttgaggtgggcagtgttgaagggctcctggggcgtgtacattttgagcgagagagagcggcgagatggtggttcggcgggcacgagcgttgccggcggccggaggccaagaagtcgacgggcacgccgcttcccttggcctcgacctccgtcgcaatcttctctcaacggcagtgctcggctggcagcctgctcgatggcccttttctcgctccggaacgtcttccaggtcgtgctggtctcactcctagcgttcatcctcaacccccttacggacgacatggccgacgatgcggccgaccggctgctcgacaggtgagctcttgtagctgccttgctctcccttcagctgcagctcgctctgctgaccattgcacgtcgggaggctagggcagatccttctaccgtcaggtccaagtttatgatgggctatcaaggctggtgcgtgctccgagcatctcgacgtcggctccgagcaggccgccccggctccgctggtgcggtcctgaccctggctcctttcgacctgacgcttcaggtttgggtgccctggtgatgggccgccgctcagcaagggtgagcaaggataaaacgtttgagctggtaaaggctcgtgctgacgtcgcctcgtcccccgcctagatcatcacgggtgcgccgccggcctgaccctctgaggagcctacactcgactgcaaacctgacctcctaaaccgctccctcagatggctgcactggttcaaacggccgctcgatcaaggcggcaagccgacctttgacctctggccggacatgagtgagctcgacgccgacgagcggtacgagtgcgtgcgcagcgccctctcttgcgctcgagacagcacctgctcaccctcgtcttgcattttgccgaacccttgacttgcgaccttccgtgcggatcgtccagtgtctcaggcctaactctcccttctggaccgcctgcgcagctcttctcctcgcgaaatatcaagacggtccgccgtcactttgcctggctcaggcagcacggcctgccaggcgtcttcctccagcgctttctctcggaggtctaccagcccgaatcgggcatgcgaacgctccgcgacgaggttgggaggaacgttcgcgcaggcgctgaaggagagggtcgcgtctgggcgatgatgtgggacgtcagcgggacgccggccgatgagattgaggccgccattctagctgactgggcacacatggtctgtctgcggctcccacgcatagtgttgctctctcactgataatccccttcgaccctcttcaggtcgagtcggagcgtatcctcgagtcgccgtcgtacctccgagagaagggtcgacctgtcgtcgtcatctggggcctaggtttcgccgaccgaggccacgacccgcaggcgatgaagcgcctcgtgcgctgcctccgcgaaagccatgacggtgggctctggttgatggccggtacgccgagtgagtcctggagatctctctctcacccctatcagctgccactgaacagcattcccattgcacagcctactggaatcgcggcatcgaggacgccgacccgaacccggcgttcaaagagctctgggcagagtttgacgccatttcgtgcgtactcgtcagattgcactctttgctcatcagagaggctgatgcgaatggaaccctctttgctaggccctggtcggtcggtcgtttcctgaatgccgacggtgcggatcacttcaacctcgacaagacggtccgcgacctcaaagtgctccacatggaggactgggagcggctcgaggaggagaagcggacatagtacgtcgtcgattacggctgccacggtcaaaatggtcgatcttttgacagcattacaccctcttcagcgtccccgtcgtctttccaggattctctgtgcgaacgtttcgcggcacgttctccttccctagaccacaggccgactgactccacagctgttggctcctcctcgcagtggctgaacctcaaggacggcccgcgcaacgagatccctcgcgctggcggccgtttcctgtggcgccagctctggaacgcgcagcgcgccggcaaccgcgagagcatgatctagtgagtcccctttcgctctcgcacatgttatcgagcacaaagctgacgccccgtcatgtcttcgtcctgcagcggcgcgatgcgtacgtcgtccgacacgcttcgcaagcatgcagctgacccttgccgactaacgcttcttttgccgccccaacagtcgacgagtacgacgaggcgacggcgctgatgccggcgctcgcgtcatcgagggacctgccgagggaggagacctttctcgcgctcgatgaggacggagaggggctcccaagcgactggtatctgtgcgctcgcctctagacaccagctcgccgcgccgcgactcgcaagtgactgatgcctcccttcgatcgacacagacggatatgcagcctcgcgcaggaggccctcagcaacggcatggtcgtttcggagaccttgccgagggaggtgctcatgcgccggaccgcggcctcccgcgcggagcgagcgaaggacgagctctgaagtatcgcgccatgatcctctctgtgaccctgctctactcggtgaagtggcatccctatgtcatacaagcaaggtcgcccgagggcgagaaagagacaccccactggggccctgcaaagcgacgaagtaggtcagcggtcgggcaggaagcccagccaatccgaacctgcagcaggaggacgcttcgagcgcgcgtctcagaaatcgcacccggggccggtctctgcccttattgcgggggcagaagacgggcagccgggccgaccaagacggaattcagtcaatcattgctcggcctctgcccgccctgcgcacctcccccgtctcgagagggggggggggttgcggagggaaagggggtcggccagcaagtcgttgccccggcactcttcatccttgacggctgtcctagtctcttgctgctgctgcttttcggtccggtaagctgccaagcaagacaggatagggaagactcacgtgctgcgcgctgcgccgagggagacaggaggttctcatgagtaggcgcccgtctttgcgtggccaaagcgcgagccgaggccctttgcgtcgaggatctgggcctttcggtccttttcatccatcagcttgccgccgacgctcatgtgcaaatcgcggctgggggggcaagcgacaacggacgagagacagtcagctgaccgtcaaatcgccaggccgaaggggaagagagagagagagagagaggcgcgggacgtactcccagatgacgggcgccgcctcctcgcccttgcccttcttgcgcttgtcggcctccttaccgtggatgtcgagcagcgaactcgaccggtgcttcttctgcagaacgccagcaggacccgcagcacacaactgacggtcagcctccatccggggcaagaagcaaaagaacgagtagaagccctcgtgaaaaggagacggacattgtgccgctcaatctcggcctggagctcggcgtcgcgcttcttgcgccggcgagcctcatcctgctcctgttccgagagcgtcggcgtgttgacagagttttccttgcggcgcttcttgcccatcgcttcgtcctggaggcgctggacacgctgtttgggcgtgcgtttgcgggcgggtggctagacgttagcgagagcgtcctcgaagggttgacaatgacaggggggagaagaaggacctcggcaggcgtctcggtccacagcgactggtcgtcagccttgatcggcgcggccgacgtccggctgaacgccgtctgcccgcgcgggacctttgttgggtcgatatctgcgtgcacgagcgaagcgagagagggcagggaaggggagtcgtaagactcagcaatcgtcctttggctctgctcccagcgtcgaagagcggggcagtaagggggagcgagcgcgcgcgcgcggacgtactggccaatgcgtcgacgtgctctggcggcttaagcatccactcctcgcgtttcggctgcttcggcttcaacgcatcctgctcattcgcgcacacgcacgcaacatgagcccgaaatcaagggggtcagcgcgccagctcctctactggagtagcgaaagccagagcgagagccgagaagaaaccgaaaccgcacctcgcgctccttctgccagcgcgcctggcgcgcctcaaactcgtagacggctgaggcgtgctcgtcgtactcgacccctggagggaggggcatcggcccgacgacgtcgtcgtcgtctgagctctcatctccggcggaaggggctccgccgcgcggaggcgaggcgggctgccagtttggaggacgggagggaccggctgctgctgctgctggtggtgctggtcctgctggcgggcgttgagggccggtcatcatcggcgggcgttgagggccagcagcaacgacagcagcggtctgctgccggcgggcagcgagcaggtgcggagggagcgatggcccgagcgcgtcctcgtcttcgtcctcctcgtcgtcttccgtcggctgctgtcgagcgagcagatgagcaggcacagacggcccaatcgagctcaatggacgaccacctggagcggcggcgccggcagtggcggagggagagggtcgtgaaggcccagcgacgctagcggcgggcggaggagcggggccaacgtcgtcgtcgtcgacctcatcccctgcgcgcgaggcgtccatcgcgcgctggagatggggagggaggctcggtccgatcggcatggctctcgctgaagggaaaagaagaggaaagagggggtgagaaggtgatggatggtccgaagggagaagcagcagcacagtccttgcccccccccccctcgtcttcggcgcccgcagcagcaagcaggcaagcttcccacgcgtcagtcggcccacccgtaaactccttcagtcgtgcgcttccctctctcgccaggaacaaggtgtgtaaacgagcgtcgggtcttgcggtccatgcaaatcgtccattgagaaaagcgagcgagcgaaacaggacccccttacggaagggagtgcgtcagaaaggaaaggcgaggacgtgtgtttgtggggagagcaacagggcaaaaggaagtcgaaagcagggagaaaggggggatgtgcattacgagggtgagtggaggatgggggtcggatagaggaaaggaggcgtgtgcgtgcgtgcagcgacgacgacggggggtgtcctgcgagtccttcaagcgagcgagcgaggggcgtcgcgccccgctttagaggaggacagcggcgccaaagatgagggcgacggcgcccgaggcgaggccgccgacgaagccggcgggcagcgaggcggcgtggaagccggccgagccgggcgcggcggacgaggcggctgcggaggcgctggaagagaccccagcgaggccgcgcgaggccgaggcggaagcggacgcggctgcgcccgaggcggacgagctggcggcgctcatcatcgagccggacgacatcgaggcggaggacgagacggcggaggcgccggaagaagcggcgccgacgacagccgaggcgcgcgaggtcgggacgacgagcgaggccgtgttgacgccgttgccaatcgtctggtacgtcacgcagttgctcgtcgaggggatcgcagcgggagccgtgggggtgacgagctggccgaccgtgtagccagggccggtgaagtactggcggaaggtcgaggtcgagccgtccggctgggggtaaaggcccggcgcgatcgcggcctcgccctcgcacgaggtgaacgagttgttggtgtagtcaccgggcatgacgaactggcagcccataacgtcaagctcgtgctgagagggggaagagaatgtcagcaagagtgagaaagggcgaaacaggtgggactcgaggacggacctcgcactggagggcggcggtgatgtcgtcgttctcggccgtgcagatgcggaggcagaactggtctgtatggcgcagacagggaggtgtcagccaagcggcttccccgacagggggctgaagggcaggccaccacgcactgtacgacatgaacgacatccactcctcgtagaagacgtcggagccggtgacgttagacgtgacgttgccgccgatcgggttgccgaggttctcggcgccgtgcgggtcaagctcgccgccgtcgtcgccgtaggggatgttgatctttgtgccgtcgaagaaaccctggactgcgagacgaatgggggggggaagggggctgtcagcgtcggggaagaacggaaggacgaaagggaggacgcactctggacgtagaggggcgtcttgatgaagtgggcactgtagacggtgccatccgggatcaggcgggcgtcgttccggggctggaggcagtactgtagaaggggcaaaagttgcggcgttaggtcgagcgcaggcaggagagcaaagagacagggagggggggcacgcacggcaacgacgatgggctcgacgtttccaactagaaaagcgaagagaggtggcgcggacggtcagcgacccggaaagccgagactgacgacccgatctgagacgaggacgggctacgcactgacggagtcgggtcctgaagggcgcaacgagggcgggagggaggagggagggaagagggaagaaatcagccgcctgcacgcccacgcgcgcgccaaggggccgtgccaaaagcagcggcgccgcagcaaaacgataaaccaaaaggaaagacgcaccctcctcgggcggtccaaagaggcagaagtcgtcaatgccattgagcgtgagcaggcgagccatcgacgtctggttgatggcggcgccagcctcggccatgaagggcgcactgtagggaggggaaagggaggctgccttcgagctgacgctgatccatgcctttccttctgcgaaggagtgagacggccaggacggacaagggaggcgagacgaaagccgcaggggaggtctgcgcagcagctcaaccgactacctcagccccggtggcttccgacctgctcgttcctctctctccttgcactgtggctggcgatcgagactgtgccgacataactacagtctctggcgtgcacccgttgattatccactcgtgggcgtcgctcacagcggtagctccttcctagcggtcgacggccgctccagatcccgctcagcccaaaggactcgtcgcagctgacaggcgacggacccggtcgctcatgcagtttctttggccatcttattccgagtatatctagacggccagcgccttgagcgacttggcaaggtcctccatgccgcccttaagcgacttgagcgtcgcaatctcggcatcgagcgccgggccagtcgccttgtccttcttgagggctgtcaccttctcggcctgcgccttgatccggacctcgagcgcgatcacctcgggcgtccgagggacgtcagcaagggcggcagtggcggccgccttcgccttcttagccgcctggttctttgagagcggcggcggggccgtcgacgtctcaccgccgtactttgcccgccactcgtcttccttcttgctgtcgatccggttgaagagcaggaaagccgcgccgagggtgtggcccgggaggaggtcgatcgagaagcgctcggcgaccgaccgcatcggcgcattgagctgggtgcagatgccctcggccgtcgtcggcataaacgggtggacgagcgtcgcaagcgtgtagacgaggttgacagtcatgtagacgacctgggtggcccgaaccgggtcgttcgcgagtagcgcattgtcgagccggttgtcctggatgtactggttgccccgggccgagagggccatcatctcgaacaggccctgccgaagctgtgtgtagtccatcgcccggcggtaggcagcgagccgggcattgacgtcggtcacgaaaacctcgtcgatagcgttgggcgccgcctcgggtgcgagctcaccgccggcaaggtcggccgggccgggcaggacagagtcgtacttggcggcgacaaacttgacgatctgtggaagggtgtatggcgtcaagggtctggcgcttcgggcgctgcaaaatgagccggcgaggacgcacccggttgacaaagttgcccaaattgttgagcagctcagagttgttctttgcgacaaactccttccagacaaagaccgagtcgcccgtctcgggccggttgccgatcaagtagtagcgccagacgtcggccgggacgccaatctccgaggccgtgttgccaaagacgccgacattgcgcgacttggagaacttgccagattcgtagttgaggtactctgccagtcgcaaagaaggggcgcgtgccgaagaggaagggaagaaggtcagtcaggaacagcgacctgagagctgcgcaggcaaagagaatgcacccgtgctcgagacgcggtgtagggtcgtccagtcgcgaccatcagcgagaagcgtcgctggaaaggccacggtgtggaagtagacgtctggaggggacagagcacaagatggtcagacctcttgtcagctagaggtttcggcagcagacgagggccagcaatcaggacgcactgtccttgcccatgaactggtacagctggacgtcgtccggcgccatccaccacttgcgccactcatcagtgtaggcggccgtgatcgagaggtagcctattggcgcgtcgaaccagacgtctgcgcgggacaggagtcggcgagtcagcctgcggacctcgaggaaacattcagagaacagagacgcacacataaccttgcccttcatcgcggcatcctgctcggcgtcgcccgtctcgggcacggcaacaccccagctcaggtcgcgcgtgattggactcggcctcaggccgcccttcatccggggctcgacaatctcgccctttgcgttgacgacgacgttggcgtcccactcgcccttgacacgcttctcggcaagccaggcctcgagccggggctggatgacgtcgagccgcatgtacatgtgggccgacggccgtacgacgagcttgtgggccgacgagcgcttgcagcgcggcttgaggagctcgatcggagaggcaaacgtccgcgtgcagttgtcgcactggtcgccccgggcgtcctgcggtgtccgagacggcagtcggatcagcataaaagcgttctggccactgatagagcgaaaagcagaaaccgggacgcacatcataggcgcaatcggggcacgtgccctcgacaaagcggtcggcgaggaacctgaacgcaaggtaaggcgcgaagcgcaatgccggtcagcatcggccctcctagcagcaggataagcgagggctgtgagaagacggaccgctcgcagccggtgcagtacgtcatctcctccgacttttggagcagcatgtcgttcttgcggacctgcaggtagatgtcctgagtaatctcggtttgcttctgggtcgaggtccggccaaagtggtcgaacgaaatattgaaccatctgtcgagcgcaggatgaatgaagtcagcgctgagcttggtgagcgaactctcgacgcgtcttgaagattggcaagccttccgtagatgaatgcacgcacttgtagacctcggcatgcagggccgagaacttgtcgcaaagctcgcgtggagtgacgttctcgtcgagcgcctgtgtcgattaaatgcggccagtgtcagggacctggtgtaaggacaagcagcccctctgctgccgcctacttcaggctgcactcctagccgacagtcacttcccttgtccacctcttcgccagaagaaactgaccttggtctcggtcgcagtgccgtactcgtcggtgccgcagatgtaaagcgtcggaatgttgcgcgagcgcgagtagcgcgcaaagacgtctgcgcaaggcgcagagcaagtacgggaggcatccgagatgtcagatcccaattgatctggttagagcgcgccaggggaggatggagacgcaccggccgagagggtcgagccgataatgttaccgaggtgagggacgttgttgacgtcttggagcacgcggattggtcagaaaggtagaagtcgaaggaagagtcgagcagacgcacaaggcagcgccgaggtgatcaagtggttgtgggtgcccttaggaaggctgcgagtgcggagggactagatgatcagccgctagagaaggacagatggagatccagcgagttattcgcaaatgcagggaacatacctagagagacagtaggaggtagagaggtcgacaagccgacagcagatcgcgaggtcaggagtcggtcgcatcaagggagggacagggtccggaggggcatcagcttcgaggggacgagctgcagctacatgagtcttggtgtctggacgcacacggcgcccttggaagggtcgtggacctccatcaggaggccgtcggcctggcggacgttggaggtcggcatggttctgtcaaagatggtgggtcagaggggctgtcgaggtcggagggtgaagccgtcgtcgcagagtcaggcggctcagcccgcgcctgtgcgtggcgtaacgcccgagtcacgctttggcttgtaagtcggagcggccggcgtgagctgcagcaggcaagcaaggcatctcgctactcctctctttgaccaagaccacgcccgtccctccatcctttctctctctttttgacagcagcacgaggcatgatggcttcgcctctcgccctctcactccgctcgccagcagcagcagcagcagccggccggcggtcgttcgccctcgcctcggtcctccgccagcctcaggcatccctgcctcggctcggcgctcatggccacccgccgcccgagggcgacgtcgaccacggccggagcgcctacggcttccacgtgcgttccctggcgacagaaatggggttgggcgtgtacgtgcaatgcggagaagggagaagatctaggacagctctcagggagcggcccgtcagaccgggcgcgcgcgaatgagagcaggccgctgaccccgcaacacaagagacgagactgacgcacattgcccgaccattcctgcagtcgcaccaccggcacgaacactttacgtaccctggcgaggagcaggcgccttacctgcacgccaaggcccgggcggagggtgcgttcttgctttggtttcttgccggtgccagctcctcgttcaggcctcggactgtgctcgtctgagccggtccaggctagtgacgattcagcgcacgtcgtacggggcccaaacccatgctgacgcgctcactcatgcttgtctacagatccctgggccgactggaagggacccggcgtgcgcacctttgtccttgtcagcctcggcctctacgcctacgtccagatgctgccctcgcgcgagtcgatgaagcggccgcacacgccctcggctgcccggccttcgttcgacacggtcgcaaagcagggcgaggacgaccctcggccgtacatgatccgtgtctttgactactggatcccgggcttcgaggagcgccagcggaccaagatggacgaggcggccaaggaggtcgacgaggcgaggcaggcaaacatcttcaagacggcagtcccgtccaaggttgtccgtcaagccgactacttgtgcgtcgtttctctctcgcctggcctatcaggctcggcatgctcaacgcctatcgaccgccctcgctctgccgtcctgaccacctgttctcctcgtcccgcagcgagccctaccacaaggaggctgccggccctggtcagctcgccagcttcgagggcgtcaagattcggactgctctcgacgacgagcgcgagtgcgtagctgcttcactcactctcggcctaccttcctctgctcttttctctgcggaagacccctccaacatcccctctagatagcaagcctttcgacgagacggcgttctgactaaccctctcccctttcctcgcgcacaggctcggcatcgaccggaagcaatggctcagcgagcccaagcaggtgtaggagtggtctggcacggagggaaggcgagacgggtgatcgtacaaaggcccttgacttttcttactgccgggcctcgagcgttggggtcaggcgggtcacgagcagatgagggagacgaaagcatctgcctgggccagacgagcagcacttctccgagacgacaggtcgaccacagtcgtcgccttggacgtcgctctggctggcggcggaggattgactctccgcggggctccctttccgccgtctgtttcgcgcgatgccgacgacgaagcacgagctgcgaaacgaccctccgaccatccgaccccttctcactgtgtcctcagcagctcccacctctcagccgcacgagcaacttcccattagaccagaagccgactgccaagccgaagcgcctgcctgcctccttctcgcgaaccgcgccgccgccgcctcctcgccgccgctcgccgctcgccgctatgggcctgctcgtcgttggcacgccgctcgactgggacgcctcggagccctaccgggcaaaggtcaagcacgacggcatcacccagttcctcgccctctacgaccggctcaaggaccgcaaggccgacatcctgtactggggcgacgaagtacggcgcccatcgggcctcgctccgcgcgggcgggtggctgactgacccggcctgtcgacctccccgcctcttgccgacagatcgagtacctgatcgtctcgtttgatgacgagcgcaaggaggccttcctgtcgctctcgcagggcgagatcctcacgaagctcgccggcgtcgtgcacgacctccagtgcgaccagtcgaaggagtgcgtgcccgcttaggcctgctgaccgagcaggccggattgcccaagccggaatcgtgcggctgaccctttcttcgtcctttcgacagcttcgatgtgccgacgttccatcccgagtttggccgctacatgctcgaaagcacgcccggcgcgccctacgatgtcaccgtcccttcgctcctctcagtcgaggccaacatgcggctccggcgccagctcgcgagacgctacctgacggccaacgagctgcccatgacgctcaccgcctggccgaggttgggcgtgaccgattcggccttctgcgacccgcacattgaggccgagggcgccgccatgcagtcgctcttcgtcagcgacgaagtcatcaacaagcacatccgcttcccgtgcgtccttcctgaggcgattgggtgtctggccaaagcatgaggctgatggccaatatttcctgctgccttgcgtgctgtaggacgttggccgccaacatccgccgccgacgaggatccaaagttgcgatcaacatcccaatctttaaggacgtcaacacaccctcgccctttgtcgaccacacgatcccatgggaccgctcgctttatccggccgacagcgaggccaaggctggcgccgcgctcgaggaccacatttacatggacgcgatggcgtttggcatgggctgctgctgcttgcagatcaccttccaggcaaaggaccttgaggaggcaacaaaggtgtacgaccagctcgtccctgtcgcgcccgtcatggtccgtccctgcctgccctctctaccgtcgcctggagtctgtcctgacctcagtctctctccagcttgcattgtcggcagcatctccggccttccgcggctaccttgctgacgtcgactgccgctggaacgtcattgccggctctgtcgacgaccggacaccgggcgagcgtggcctcgcagtacgacccccttttggtcagctccagtcggtatcgacctcttgctgaccgcccgtctcgcatcacgccttgcagcccctgaagaagggcgagcggcggatccccaagtcgcggtacgacagcgtcgactcgtacatctcgtcgagtccgctcaatcggccagagtacagcgacaacaatgtgccgatcgacgagggcgtcaagcagcgcctgctcgagcatggcatcgacgagccactcgcccatcacgtcgcccacctcttcatccgcgacccgctcgtcatctttaccgagacgctcgaccaggacgacgccctctcgacagaccactttgagaacatccaatcgaccaactggcagacgcttcgcttcaagccgccgccgccgcacaccgacattggctggcgggtcgagttccggagcatggaggtccagccgaccgactttgagaacgccgcctactcggtgtttatcgtcctcctgacccgggcgatcctcagctttggcctcaacttttacctgccgatcagcaaggtgcgccgaagacgctttctttgacctcccctccggggcgcgcggtcctctgtgctgaccgccttgccgtcgcatcggcatccgctgcgcgccccaggttgacgagaacatggcccgcgcacagaagcgcgacgccgtcaaggaccagaagttctttttccgcaagtcggtcacccgccgaccggcgccaacggcctcggcccgatcctcggttccgtcttcgccgaccatgtcgaccttccctgctggcagcgggccgtcaaagacaaacggccacggcgtaacaccggcagcttcgacgtcagcgaacggcgccgtcaacggtaacggcaacagtgggcgccagacgcggccaacgtcgcccgctcttggcccggtcgaggacgagtacgaggagatgacggccgacgagatcctcaatggtaagccagggaccgactttgtcggcctcgtcggcctcgtcacggcctatgtcgattcgctcgagatcgacatcgaggcccgctgtcagctcgccatctatctcgacctcgtccgcaaccgggcgtctggcaagctcgtcacgccggcagcctactatcgtcgcttcatcacctcgcacccggcctacaagggcgactcggttgtctcgcccgaaatctgctacgacctggcgaaggaggtcgacgagcttgagcgcggtgtccggcgcgcgcccgactttcttccggcctcgtaccgtggaattggccagggcacgcagacgccccgtccatgatccaatctttgatgagcccatctcgtctgcgttccctaccaaagctggaacggctgcgcaccgtcctaactcgttgcatgcgcatggccaccgtacctcgatttgtatcagcgaccgtaattgtcgcccagctgcgagggcgacgtcatcggtcagtcggagcgccgtcagtgagaacgaggtcagcacaggctcgctgctggctcattgcgcgccctcctcccttcgcagagtcctccacaccctgcctttcgccgagccgcttgcttgaactcgaacacgcaaatgaggaggtcgtgacgtcataggtaacgcaaccgaggaactgaggcgtgaaggcggttcgggacggtgagagtacaggcgagcgaaagtcagacagacgatggggtgtgggtacagcgtggtgcagagggtttttggaagcgttcggtggcacagagcgggcgagacatggcggtcggagcaaagccgaaagtatgaaagacaggatgctacggggagagacaggaagagacagaaagcttgacgaaggaggcggtactagggcgaaggaccggagaggacgatgcgagggtcggagggtcgaccctcctcaggccgaaggcctgatacttttattgctggggggcgcgcgggaacggccaccgcgctggcgtttaccgcgggccagcggcggccggccagacgagtgggatgcagaagccgcgctcgttgaggtcccagatggagaggccttcttgacggccgaagtcaaggaggctggcgctggggagcgggcgcgctgaatcgaccgctgagtcgacggcgccttctcgcctaatgattgggacggcttcgagtgagagcgacggacaggctgagtagagcggcgaaagtcagcgagcttgtcgtaccacgacgttgaagagggcccacctcggagacaattctccgctgctccgaacgacgcaaggcagcgaccgctgagggcgacggggtcgcattctggaagattaggagaaataggttagcaccctttacaatgccaactcgtcaagggtagaaattactcacgtcgcagaacatggcggtcagagagctgacgtccaggacgttggcgccgacggccttggtcttgtcgttgcgcatgacggaaacggccgggaggctagcacgggcggaccgcttgggcttgttggttgtccgagaccgttcctcggcggtcgggtcgcagcctcgggatggccggtcaagcgaaacaagtgcgcgcagctcgccgacgacgacgactggcgccggcagtgcgagagcctcggcctcgcgagaagcgagcacggcctgccgctctttctcaagcacagagctctggcgctcgcgcccggcggcgacctccatcgaagcgagcgcacgacggcctaggctgcgtggagcagcctgaactcgtggcccgggccgacgagcacctccgtttgcaaaacctctgccgacgcccgctggtagaaagatggcgtcgtcgcagcgctccaggggcaggggtgaacttgcgtcgagcacgagcggccgagatgagccgatgactggcggcctgacgacggccggggtcgccgagtcaggcgggtagagctgagcacgcccatcatcgaggctgaccgggtcgtcgtcccggcggccaatctgctgtgacgggcccgtgcgagaagcgatctcgactgccggcaggagaccggtcgcggccggtagagtcgtgatgagaggcgccgtggcctgcagacccggcggcaacgcaggcaaggtagtcggcggcggaggcccggcctgatccgaaacagaccacggcgcaggcaggctggggtggccaaaggacgggtcgtggaagggccgagcgtagcccgcgaggcgcgaacggaagacggcgtcgtcaatctggggctggatcgggatggtggccgaggccagcaggtcttgcggcgcctggagacctccagtcgacgagtaaacgcctggaaggaggtgctgcgctggcgacgactggtgagagggctgactgctgaagggcgagccggtggcgcccattgacgacggaggggacgagctgaaggcgctcgcgctgggcgtcggaaatgccatgtctggcgaccagacgccaccgaccgtcggccgaccgaacggctggttgaagagctcgttggacgcctggagcttctcgatgaggagctggagcgcaatctcctccggagtcgggcttcggccgcagatggccatcggaggagcgagccagctggtcgcatgcgcgctctcgatctcgtagagcgaggggtgagggtgggcagtcgttgacgatggcgggtagtgcagcgggatcggcgaaggtgcgagagagaaaggtgacgctgcgatatcggggggcatgtcctcggcacgtctcggccgggcggccttgaacatcggcttggggcccgcagaccggacgacgtagtcggacggacgcgagtacgcagagttgagcaggtcatcgtcggccaggacgcgagtggcagggttgagcgcgcccggccggcgctggaagtgcaggtagtcgacgtgctgcggcggtcgattcaatcagcaccacacttaccactgcagcgctctcgggtagagaacgcacctcgggttccgggtcttctgacgagcgcatccagacattgagccgaccggtgctgtcgaggaccgacccatcaacgccgctaaggaaaaaattccgcgtgtatgcgcgtcagtccggccggccgacgcacattacgaaaagaatttgacacgcacgatgggttcctcgcgtacgggagcgactccgggccgaccatgacagggatcggctcgccgcctatgcccgagctttgcagccgcttcacagcgtcgatccgcgcccgcctgcgcgcgaaggccgtcccgtcgacgaaagggacgacaccgagagccgcgtacgacttgaacttgtctgccggaagccggctgcggacggccattgttggcggggctcgctcttcgccatcgataccgctgaaaaagaacggctcggcaaatggtgagagtctggtcggcgccggcgaggacgagctgggtccgggtggagcgagaacggccttagagaaggcgtcagagacgacggcggtgtcgtagatgaacgagatggtgtcctgctccgagaagaaggacgagtcggtgtcctcgctggctgccagcggcggagagaagttggggtccgggttcgcgccgacggcctcgacggcgctgctgttggtggctgtcgtcgccgccaggcctactgacgcgccgccgctcggcaggcgcgaccgaccgccaaagggcgaggatgaaggaatgcgaccgcgaacgggcgacgagacgggcgtcggtgcgtttcgtctgaccgggctcaggccgagcgacgacgcgacggaggggaagcgccgccgagccggaccggggctcgagacgacgcggagggtgccgacgcctcgggctatgcgggtcgaccgagcgcggcggacgacagcgccgacggtgtcgctgccggacgagtcgctgtcggccgctaagtgggtcgacggcgaaggcgtgcggattgagtccgagtcggacgaccagtcgccgtcctcgtctgccgcgttacccctcaacggccggtcgccaccccgcaggagccgacgccgacgcgaagcgggcgagaagaggccatcgtgcgggagagaaagacggggccgagctggaggtcgcgagatgggcagctgaggcctgccggcgttgcgcagctgctgcaggcgggtcctgggggcagcagcggggggcgaggccagctcgggcgacgctggatccggcattgctgtcgtcaattctgcgcaggatggcagtttcaaagcgccggctgagaaggcgaggcgggagggatgaggccgggcggtggcgaagctggcggcgagtgggggatgggagacggtcagcggcaggcgcgtcgacggagttcgcgaggcggtccgcaccagagtgggagtccgagccgagccgagggaggtcgaccgggagatggaagcagggagtgtcgtcggctggtgagggcagggagggtaagcgagagaggcaggacgagcggccgcagcttccttctgtcttgtgctcgccacgggagagaaggtggcgggtccgtttgcgcaaggcacccctggccaacgtcgacgcgtcaggcacgccagacggtcaggtcagcaagtcacccgagcaccagactcgttgagcagagtgcagcttggtaggcggcaagggtcacggtacagtcgggacggcgcacgcgcaaaggaaggaaggagtcaggggggggcggggcgaggtcgtactgggtgcaggatcgggcggtgcatgaggctggagggagcaaaagggagaggaagcatacgaggggcagagcagcgcaggagacgaatgaagggtcgagagatctagtgggtcggtgctgtcgaggtcgaggggtggatggaggagggatcctcggtagcggcggcggtcgcaggggctgacgacctggccgcctccgagcgactttttgagtgatggctggcgagagagacaggccgatgcggatcggcctagctctgcagaggcagccgcccgctcacatgacgacgcagccctccttgtcggccgcatccggcccgccgtcgggcgagttgcgccggtccttcatgagcttctcggcgtccttgtcgcggccgatctgggcgccgccgccgacggccgtgccgttcgaccgcaaacgctgggcagcccgcttgtcgccctggtcagccgcttgctggtaccagtagagggcgtcctgcgtcgaagggtcagttccgatgccgacctgcaggaggcagcagaggcgagaggatcagcggcttgcgtcaatgtcatctctcgctggtgcgcgacgacggcatacctcggtgaagtagccgacggcgtactgcgccttggcgaggccggcctcggccgccttcttcgcccagaggtaagcctcggtgtccgactgggggaggatgccgggcgatccgacgagataccacgctgtcagggcaaagcacgcctcgcggtgctcctgctgggcggcgatgttctgtgccgcgagagagagatatcggaggtcagttctggcagaagaggaggatgggaggatggcagcagacacacgtagtaatggatcgagagtgcggcgtccatcgggcagcccatcttgccatactcgtagcattcgccgagcttgtacgcactcggcgcgtacgacagctcggccgccgacgcgagcagctcggcagagtactcgaggtcgacaaacaggacgttctcgatgccgcgctcgtggaggagcgcgagttcgtgcagcgcgtgcgggaactcctcggtcgcatgatcagccgaccgcttgagccacttgacgccctccttcggccgcttggcgagcccgaggttgccgttgagctccgccgtcccgagccggtacatggcccccggatgaagtgcggccgcagccttcctgcagatcggggcaacgatcagaggaggatcagcttcttgagcttcttgcgttgcgacccgctcgcccggcgtacttgtagaagccaactgcgcgcgcactctcgcgccggcagccccagccattctcgcagcaggtgccggcccggtaggcggcgtccgggtggccgtgcttggcggcgaggataaacagcggaaaggccttgtcaaagtcctgccggccgcgaacggtgccgatgccgttggcgtagcagtcagcgagaaagtactgggcgtccgggtggccgcggtcggcgagccgcttgagcaggaccgtagcctccttgacgagcgagtcgcgctgctcctcgatatggacctccgacaggccgtccgacggcgacagtgacttggcagcgtcgatcatgaagacggcaaactcgaaaatgatctcggggtcgtttgtcttccgggcgttggcccggtagagctcgagcgtcttgctgtggtgcagaagggcggccgatgcgccgggccggaggtgtctgcggcagcgacgcccgtcataaaggcagacgacgagagttggcacaggctgtcagcgatctttcttccaaaagcacaccgcctcgagagcaggcgtcccaaagggaagaaggcagacgagaaggtgaccaagtgcacagcacgcgcggcccgtctcgagagctcgcgcctcctttgtccccgcccacgacgggtgccgcccttcccgtccgccagtcctcctcgagcgccgtcaagtcgaaatagtcaggagagagagagcgcagacgcacgactggtccataagcggcggggcgccgccgtacatgctcgcggccgagctctgtcgccggtcgtccttgggcgactgggggggcgcgccgctgcccaggccgaagtcgctatagcgcgaggacgacgccgagttgggttcgacggcggccatcgagaggggagagggtagagcggtaggacgcgagccagaggggatcaagaacggtctaggagaggcggcttgagggcgacggatcgaggtggaagggtcgcggcaagagggagggcggaggacgaggctcggcgagctcaaactcggcccgcgcagcagcccaaacaactctcgggaggcgccggcctcgtgcaggacggcggcctctaaaagaacgaagcgagcaagtcgtaaaaggtcgtgcattagatagagagatctcgcccgagcctcatatcggctggatcttgacgggccggctctcgccgacgccgccgagtgagaggctgccgaagagggtgaagaggacgaggcagtggagggaggccgcatacagctgtcgggaggagggggcatcagctaagggctcctagccagcgttggcagagtggccgacgcacgacaaagatcgagcgcgcccgccggttgccgatgatgcttcgacaaagcgcaaagacggctcgctcgatcggattcagcgcctggatggccctctgggcctcctgcagcagaagaaaagcggatggacatcagttctccattcctgtggtgatgaagcgaacgcaagagggacagacgcggctcttgaagctctcgaatggattgaggctctcgtcgtacttgtccttgtacaggccaatgtcgtcacgcccgacgccaacgccatcgagcccggcccttccgccgccggtcgacgggccagcgacgcccgacgaggcgtcctcgcggtacgagccaatgtagcggaccttctcgtacagcttgaggttgtcggcctggagcgccttgacctcgcgtcggaggtccgagatcgtgtcaaactgcttgcggagctcctcctcgagctcggcgttgcgcgcccggaagcgatcccgctgcgaggtgacgatcggcaggatcgagttgtcggtctgcgatgcgccggcagcggccggtgccgttggaagcttggccttggccgggctgctgtcggtctcggtctccttgccctttccgctgcctgcgccgccgccaatcgcaaggcctgcgagaccgccctgccccttctcgccggcgccgctctcgggaaccaaggaggcagccgcatcgccgcggtcgttgatcgacagcaagtcggtctcgagccgctcgttcagcttcttctggcggtcgagctcggcttgggcggcctcgagagctcggtcgacatcggcggagtgctgcgagagaccctcgtgagagacctacggtcgagccaaagcagcagccgtcagtttcgtcccgcttgcatatatgcgctagaaggtgagggcctcacgcgaagtactgtcagctcgtcgagaatacgccggttcttggccgtcagcagctcctcgaggctcttgccggcccgccggtttgcctttgccgcgttcgggtcaggcatcgccagcgagccggtcgtcgagtcgggcccaccctcgtcggtcaccgcctcggcagcgtcctcgtcctcgtcgacgttcaggcctccgaactcgacaaactggagagtcagtgcagaggcagcgtcagctgtgagtccgagcgcagctttcgaagactggctgagaggggcgacagaccttcataatctcgagctcgcgcttgatctcatcgtagtcgtgatattcgcgcgtcctcctgcggagcgcctcggcctcgcgagccttctcggcagcctcgcgctggagctcgtcgaccttccgctccgatgcccgccgctcggtcgcgcggccgtccttctcaccctcgagcgcgcggagcagccgagcggcctcgccttcaagttcagcgagctgaccctccatcttacgcgcgcgcgagacctcctcggacccgctccgcacgctctcaatctcggcccgcaggagctcgttccgacgctcgacggcggcgacccggccgttagctcgctccaggtcggcgacgacgagatcgagctcgccgagcttggcgacgacctccgagtcttgccgctgcgacgcatcaagcaggcgcgtctggaccgagtcgttcgacgtccgcaggtcggccacctgagagcggaccgttgccacctggccgacgaggtccttctcgcgctcctcgtagttgcgcatgcgctcgtcgtacgtcgcgttcagctcgttttccttttgagcgacgcgctcggcaatgaggtcgtccatctgcggatcaggcgaagccgcgtcagtcgaggagcgcagtgcaggcggcgacgaggccccaagccacgcaccttcgcctccagcacggtcacgcggtcctcagccttcttgcgccgatcctcgacgccagcgatgcccgccacctgagccttcaggtcggcgttttcggaccgaaggcgcgcagactcgagctcgagcatctgagcttcagcgaccttgacagtctggtcctggaggggtcacacgccagcgcgtcagcaagtcaatccgcgcagcacaagtggctgaactcggacgtacgacagcggcatcgagtagtggatacgggtcgggcgcctcggctaggagcttgtatgcgcttagaaaggccgactcgctcgccttcgaccggcgagtgagggcgtcgatctcgccctggtaggccttcaacagcggcttgaacgcctcgagctgcgtctcggtcggctgcttcttgaactctggacaagcggacgggtaaggcgaaattttgatcagcattgcggtcgaacgagcactcccaggctgtctggagcgcgatccagacaaggtgacgcggcagtcaagccgacaggtgacgaccgcaggcgcgtcggccgcctcgccctgaccagcacgacccgatgtagggtccgcagcgcaggacagcctggcaacgtaggccttgacggaccggccgacggtctacaggcagccgactaggccccgaaacgaagcgcgatggacgacgactgacctcgggtctgctccgcgagcttcttgcggccgacgagcccctccttctgctgctcgacgagctcgagcgccgtcttatcgagatcatgctggaggccagttaggttgatgtccttccaggtggacagggccgtactgaagtccatgctgggcaagcagatggtccaggagaatacgagatggtgcggtcgagccaggcgacgacggcgggcggcggcgggacgcgccgagcgcgagctagatgaatgttcgactggcgaggaattcagctgagccgtcgtctaagggggttccgggcgcgcggcggccgtcttgctttcgcctgcagaggacgcgcctggccgccctgacagcagcaagcaaccctctcggccttccctctctccctttaaccccaccttccttttcctcaagcaatacagccgccagcacacaatgggtaagtctctttggagggagcagacttggcaggagggcggtccgactcggatcggccgcagcgcagaaaacggagcgctcgaccctgggaggaaggcgtcgggtgggctgaggccggcggcgaccactcctcgacaaccgtccggtgctgactcttcgtcttctcacgttcctcgttcgcgcggacccggctccgttctgggaactctggaggatcaggtcgcgagattgtccacctccagatcggccaggtcagtcgccattctccgtcgagctactctcgtcgaacgcgcgcgcggttgggccatctcaaaacagcagcttgaagctcgctcggatgtcgctctcgccgcatcgccgaccctcgcttgtcctctgctacgcagatggctgacgcccgacccgctccttctgcttgccctcgccatcctccagtgtggtaaccagtgcgttgccactgctcgtcacgggcgctcgcaagttacgagcgggcgctgaccccctggctccctcgcccctcgcgtcgcgcaggatcggctccaagttctgggagaccgtctcggaggagcacggcattggcggtgatggagtgtgcgtccttgtccggtcccacgcggcgacgaccctcgcctggtccgactgaggctgatctcgcactccggggctgccttgaccgtcttgcagctaccgcggtaactcggaccttcagctcgagcgcatctcagtctacttcaacgaggccggaggtttgtcctgtgcctgccagtggccgagcgcgcgctcgctcttgcgtcagcttcgatctcggactgacgccgacgactgccgcctgaatgatcgccgcacgtccccccccccgctgcaggccagaagtacgttccccgtgccgtcctcgtcgacctcgagccgggaacgatggactcgattcgcgcctcgccgctcggcaacctcttccgccccgacaacatggtccacggccagaacggagccggcaacaactgggccaagggccactacaccgagggtgcgttgccgcccgagcagcgtggccgacattattgtctggtcgttggccgtcctgcgtacagtactgacaattccatcatcccttctctgccacctcgctctctttctccgattatgccttaatgcaggcgccgagctcgttgactcggtcctcgacgtcgtccgcaaggaggctgaggccaccgactgcctccagggcttccagatcacccactcgctgggtggtggaaccggctcgggcatgggcacgctcatgctcgccaaggtccgcgaggagtaccccgaccgcatgatggccaccttctcggtcgtcccgtcgcccaaggtctcggacaccgtcgtcgagccctacaacgcgacgctctcggtccaccagctcgtcgagaacgccgacgagacgttctgcatcgacaacgaggccctctacgacatctgcttccggacgctcaagctcaaggatccgacgtacggagacctgaaccacctcgtctcggtcgtcatgtcgggcgtcacgacctgcctgcgcttccccggtcagctcaactctgacctccgcaagctcgccgtcaacatggtccccttcccccgtctccacttcttcatggttggctacgcgccgctcaccgcccacggctctcagcagtaccgggcgatgaacgtcgccgagctgacgcagcagatgttcgagtctaagaacatgatggccgcctgcgacccgtccgtcctcgcctgcgcctgcctctctgcgcgcgcgagtcgacactgacaatcaagcctgtgcctctccgcagccggcacggcaagtacctgacctcggccgcctacttccgtggaaaggtctcgatgcgcgaggtcgaggagcagatgcagaacgtccaggtcaagaactcggcctacttcgtcgagtggatccccaacaacatccagaccgcgcactgcgacattgcgcccaagggcctcaagatgagcgcgaccttcatcggcaacaacacgtgcatccaggagctcttcaagcgcatcggcgaccagttcagcgccatgttccggcggaagggtccgtcccccgtccccctgcgccggcttcagtctgcgctcttggctgaccctcgttcggcctgctgccagctttcctccactggtacaccggcgagggcatggacgagatggagttcacggaggccgagtcgaacctgcaggatctcgtctccgagtacacgtacgttttgcgcaagctcgaccgcaatcttcctcgctgatccctttctctgcttcccttctacagccagtaccaggaggccgcgattgaggacgaggcgggcgagtacgccgacgaggtcagtcgcggattcaagactgctttcgcctacaatgcagccgctgactcaagcgtttgcttggctttacagctcaactacgaggaggagcagtagatgccgtcgtctcccctgttcgctcgcttttcttactctgtctgcccctcgccacccgtctaatcaccgctcggcttgcctttgctccttgaccgcccatcggctccccccaacttgcccttgacacacgcaggccccatcccagcacctttccctctgctcaagtccgtcatcgctcgcatgccgcaccccttttctctcttctgccctaccttcctcttccccggctcaacccttttcttcgtaacctttccaacggggccgctcaaaggggatctccgatgcttgcttgctctctctcactctttcttccgttcgctaaacgggctattgttaagctttatcaggagaagcaggcgttgtgcgattcagggctgtcggctgagccgggtcggcgtttcccttcctccgccggccttcgccgccggcgcctcggccgacccctccacccttctgcatccctccactcccacccaccctcagcgcaggacatggagggggccgggacaggataaagcgctaacaggcagagggaggcggcacactcttgtagctgtcgcccctcttcctcgccatgcccttcgctcacgccttgtcaccggcagcctccgacctcgagttcgcccctgccgcccacagcagcagcacgacgatcgtcgccggaattggcgagccaaagcagccttcgcttcgcgactctacctctccaccggccatccagactgagatagaagctcggccgctcccaacaaacctgcgacgctggtgcttgctcgtcatcttttgtctggcacaattctttgagcgagtcctctgttcgcgggcagctcccgactctctagcggacacggctgactgcgtccgcgccctccacctctacagcatcttctccggcagtgcggttttgatcgccgtacccgacatgtcagaggcgctcggcatgtcgccggccgagggaacctggctcgtcaacgcctatacgcttgccctagcggcctccatgctcgccgccggccgcgtgagcgacatgttctcggccaaatggaccttcgtcgtcggccttgcctggatcggcatcttctcactcggtataggcctcgcctctgacaagatcttagtcatcgtccttcgcgccttcagcggcatcggggccgctgccacgatcccagctgcgctcaacctgatcgcgcacctcttcccgggcgagaaggagcaggcattggccatctcgatgtacgtccagctcgaagccggcctcaagcacggtcaccggactgaccgatccttgcctgcatcctccaggttctccggctgcggtgcgatcgccaacgtagtgagtagtcgcgtcaccgacgggctccccgccacgacgactgtcgctgaccgtgtgaacgctttccttccgacctagctcggtctcatcatcggcggcgtcctcttactcgccggctacgagtggattttttatctcgtcgccctgtgctgtattcctggcgccgtcgtcgctgcgattctcattcccggccacgcaagctcgcttggcgagcagttgtgggacagcgcggtcgagacggccccagacggcacgacctacgccatcgagtcgcgcaagcccaagatggactacctcggcctcatccttctgacggcagccatcgtcctgctcgtctacggcgtctctaatggcaacgtcgagggctggcgggaagcccggacgcttgcgccactcgtcatcggcatcgccctcttcccggccttcttctttgtcgagacccgcatcgaaccggtcgacgcgctcatcgaccccgcaatgtgggcggtccgcaacttcctgttgctcgtcatcctcgggctcgttcccaatctgtggtggttcctggtgtaagctgcgtcccttccgatcgaccatcctcggccagtgcctgactttcgacccaccttccgcgtctgcagccaggtcgtcttctccgaagtcgcccaacgcgactggggcatgtcggctctcatgacggccgtccacttcctgccgctctctgcagccggcgggacagtcgtcgtgaccaacggcctcctccccgagcggtttcggctcaagtggcgaatcgtcgtcggcggctttggcgccatcgctggctcactgctccttgcctttggctctgaagaccgcctctactggccgctcgtctttcccggcttcgtcgtcggctcgggctcgatggcgcttctctgggtaacttgctatgtcgccctgatgctctcggtccctcgcaggcggagcggggtcgccggtgctgtcttcaacagctcgcttcaactcggctgctcggtcggtctctcgatcgcgacggccatccaggtctcgttcccggcagcagggaccggaggcgataccggccggcctgtcatcccgtcctggaagggctaccagagttcgctttttttcggcttggccgtcgttgcgatgatccccctcctcaccctcatctttttccgcgacccaacggtcaccgagcccgcctcggatgaccgaccagagggcgtgcttgaaaagagctcgtcggtcgccgcttgacagcctcttgcctcctcggtctgtttgcctctcctccactctgcgtttccttgtacgatgtgcgtcctaccctcagaacactgacaacagagcagcgggttgggtggtcatgagcgttacgtagagttgcaggggcaggtgggtgagatggtgatacaagtcggtgcaaaatagtccgagagaaagcgcatctaggctgaagttctctaggttttgattgggggtgcaaatgggccggttgcatgaggaaggacgtcatcgccggtggccagcatctcctgggcgatagaggtgggaggcgcgggctcgacaagcgggtcctcatagaaggcgagcgtcgcaaggatgacggcgaccgtgcagccggtcgagagatagagcgagctctggtagcccttccagctcgggatgagagggtggtctgccacggggaatgagatctggaggacagtagcgagcgagaggccgacggacgagccgagctgaagactcgagttgaagacggcgcccgcgacgcccgagtgctcggccggcgccgagagcatgatcgagacgttgaaggtcgcaaatacgagcccgttcgaagccgagccgatgaggaggcccgggaagatgagcggccagtagaggtccttgcgcgaggcaaacgagagaaggatcgagccgatcatcgccccggctgagccgatgatgatgcgttgcttgagcgtgatccacttgggcagatagccgtggagcgtcgtcgcgaagccgcctgcgaggccgttgggcaggaacatgacggcggtcataacgggcgaggtgccccactccttctgaaggagatctgagaagacgacctgggcattgaaccagtagaactgcaggatgagagcgatggcagcgatcagcgacaagaatacgaaatcagaagcacctttgggaagggcactcacgtaggggactctaaggcaggcaggggaggggcgtgctcgtgtcagtgtttccattcctcagggcagcgccgagcggactgcagaagcacgcacaagctgaggacggccagcagcttgaagttcttgatctgccacgttgccgggtggatgagcgcgtcgatcgggggcatgcgaagctcccacatgaagaaggccgggaagagcagtgtgccgaggacgagcggcacgagcgtgtcggcaatcttccagccagtaacgttgccgttggacacgccaaagatgaggaggacgaccgccgaggtaagaaggaggaggccgacgtagtccatctttggcttgggtccggaagcggtgtggacgaccggcgccttctcgtcgacgaaggaggccgactcctcgacaggcgcctcagtgtgagccgggatcaggagcgccgcggcgatggagcccggaattgtcaccagtgtgacgagatagaagatccaggtccagtcggccaaaagaagcaggccgccgaggatgagaccgctcacgttggcgagcgatccggtagcgccgaaactggggacgaaaagaggcgaccatcagcacgcactctttccgagcgacaggctgaaggattgagacgcacgcagagagggcgccggcctgctccttctcgtcagggaagagatggacgatgaggttgagcgcggcaggaatcgtcgccgaggcaccaatgcccgagaaggcccggagaacgatcaacgtcgtcttgtcgcgcgagaagccgatgccgaggcagaagatgccgacccaggcaaagccgacgacgaaggtccatttggccgagtacatgtcgctgatgcggccagcctgcgaaagacaagaagtcggtcaagtcagcacaccggacgacgagcgagcgggggaacgcaggcttaaacgcacagcaaggagaaaggccgccagtgtaagcgtgtacgagttgacaagccacgaggactcggcggccgtcatgctgagatccttgctgatggtcgcaatggcgacgatggtcgccgaggagaggtagacgtcaaagaactggcaacgggcaagcgacgagcgaatcagtgaaaggtctaggcaagacttcgagtgcaggctgcatcttctcacctgcgcgcagaggaagatcgacagcagcaggtaacgccggaactttgacggcagcggcggcgccaaggctcgcgtcgaggtcagggcgagggggaggctgcagaagcacaggcgacgaggcgaggcggtagctgcagtcagcgagggtagctccgatatagggaagacaggctaataagactggacgcactctgccagctcgctgtccttcttgtcctcatcggccttggcgaggtatgccgccgccgggtcgagctcgctcgcgagcgtgctcgtcgagctgccgtcggcggaggttgacgcgcctgcgcggctgagggcgaccggtgcaagctcaatctcgccggccgtggccgtcagcgtcgtcggggtcgagttcatcctgaaagagagcttgaccgggagacgaaggtcgagcgaggatccacagcgagcagcgaaagaaacaaaggaggtggcttgaaggaagggctgcaggagggcaacgggcgagccggggctgcgccggccgaagtcgtgcgcgcgcagcgttttcacttcgggccgggcgagcaggctcggccgggtcagaccggggacctgttcggtgtcagccgttgaagtaccacaagtcagctgtgctggtcggcatgcacctccttgacaacgtgcgaacagtgttgagccaggtccggaaaacttcgccagaccttaagacgctgggctttctttccgactgcatttatgagctgaagacaagaatcgcatctatgtgggttgagaagtacaggcgactgacagactgcgctaggccttagcgacgacgggagtcggagagccggttgactcgtccgccgccgcctcgacgagctcttcgccggccgagccctcgatcggggccgcgagcgggtcgcggaaaaagaagagcgtgaggacgatgacgacggctgtgcaggtgaccgagaagaagagggagctctggtagcccttccagctcggggtgatggcctcggacgagctgccggcggcagggaacgagacctgaatcgcggtcgcaatcgagagcccgatcgaggtgccgagctggaggctcgagttgaagacgccgccggcgacgccagagtgctcggccgggaccgagagaattagagcgacgttggacgagacgtagacgagcgccatcgaggccgagccgacgatgagacccgggaagatgagcggccagtaccagtgcttctcagacgcgaacgcaaggaggagcgcgccagccgtcgcgccggccgagccgacaatgatgcgctgcttgagcgtaaaggccttggggaggtatccgttgaggacgatgacggctccgccggcgatgccgttcggcagaagataggccgaggtcatgatagcgctcgtctcccactccttctggaacagctcggcaagaatggtctgcggcaggaaccaccagaactaagcggaagggcgggtgatgcttgatcagcgacgggcttaaaggggcagctggtccaagcgggcactcacgtagggcacgagcgagaggacggtcaggagggtaaagttcttgatgtgccaggtcgccgggttgatgagcgcgtcgagcgggtccatccgcgtctcccagtagaagaaggccgggaagcaaaggacgccgacgacgagcggggcgatcgactgggctcggtcaaagccctcaacgttgccgtccgagaggccgtagacgaggaggacaatcgccgacgtcaagaggaggaggccgaggtagtccatcttgggcggccttgcgtgcgcgggcgcgagaggggcagccttctcctcgacgtcggccaccgccgcgtgctcgagctgcgtccggccagggatgaggaaggcggcgacgagggcgccggggatcgtgatgcacgagacgagccagaagatccactgccagctggcgagaatcatgacggcgccgaggacgaggccgaggacgtttgcgatcgcgccggtgccgccgaaacttatcgatcgagcagatgagggcaaggtcagactactgatctgcaccgggggcaaaggcggcaatgggagagagcgtacattgagatggcccgggcgcgctccttgtcgttcgggaagaggtggacgatcaggttgagcgcggccgggatcgttgccgaggcgccaatgccgctaaacgcccggaggacgatgatggtcgtcttgtcgcgcgagaagccgatgccgaggcagaagatgccgacccaggcgaaaccgacgacaaacgtccacttggccgagaacatgtcgctgacgcggccggcggcgaggaggaaggcggcgagcgtaagcgtgtaggcattgatgagccacgaggcttcggccggcgtcatcgagagatcttgcgagatggtggcgatgccgatgatggtcgccgacgagaggtagacgtcaaagaactacgagcatgacagggtgtcagcgaccaatgaatcatcgagctttcgtaaacgggttgcgcacctgcgcgagactgaagacggccagcagcgtgtagcgccggaaggtcgatggcagcgcgaccgccggtgctggagcgaccagggtcggtgtcctgatggagcgaacgaaagcgaaacgtcagcaaggggcggcagaggcgcagcaagagccgacagcaagacgcacctcgacagggcgagctcgtcgcctctcgagggcaagctcgtccgcttcgcatcgggcgacgacgaaggcgcgagcttgatgtcggacccggccgaggcggccgcagcagcagcaagggtggaagcggcaagcgtctccgagctggccgaggcatcggcgtggacggcctggatgtcggcgatgacggccggctggctgatggcgaacgacatgctttgcttctgagctgggagggtcggtgtttggtggcgagggttgaagcgacgaaaagctgaagcccttgagagggagggccggggccggtgcgggtgcggggtcgagagggggtcgataggctggacgggaggctggtggaggttgatcaggccgtgggagctgtaggagcacgagtcgagctgcgaggggaggaaattggagcggtgaggagagcaaggggagcgacgctacctgagctcgaccttatgaagggcgcccttgtgcttgccatctcgttcagtcagcccatccgtcagcacgccagcacgccagcagcctgcttgctgaacgagcgacggcccagcgcggagaaattagaggcgttggtcggtcagcgtccgcgagcagtttccggcggagaggcgatcgaagctggtgcgccccgctcgaccggctcagtcagcgacaggggctgcagctggccgcggacacctagagggatggcaggcgtcggccaccgactcatccctcctccaccagcgtgatcaaagacgcgcgagcagcttcgaccgaggccgcgaccgacgtgaggagtcagcctagagggtacaggcggcgaggtcagccctgcaggtcgacgagctcgacgagctgccggtgcccggtggtggcgcagagtgaggaggccgctgccgctggcaacgctgccttgcctagctccatccgctcggaccagccgtgatctgcctgacagagcgctcctggcagcagcactacttgagcttcctcattgacgctcgtgtcggagggtgtgtgagatggtgcggctgggccgccggaaccggccgatagatgaagctggctcctttcaaaaatctcgggcggcgcgcgcggcgagatgctgagggcgggccgctcgccaccgccgccgccagctctgatcccctccgccataccatagagacgaccccaaagcgacagccaagccagaagcagccaacacccaactccgagcagtctcctctgcccggcaccatctcctcccagacccgcctttgtgcccagagcgagagcagcccgaccgaagaacctgccgcgcgcgcgccgcccgcaaaaccgtcggcgcccgtcctcctcccgtcgtcgagatcggccgccctggtccgccgccgcaagctctctgccgccccagccttcccgtcctctccggcgtgtctatgcaacgaagcgcgagctctcgaccctccccttcctgtccaacactcagccaccccctcctctcgcccggtgaatgttctaccaccactcgcagggcccaacgcagcagtcgtcgacgccttcccccggcctggcctccaacaaacttcagcagcagcagcagcagcagcagcaggacgccggcggatggggtcgtcatccaggcctcttcacggcacctccaccgcccaactctgggtccggcatgggcccgtacggaggctaccccccgcccccgcaggtttgtggtcgctcgccctttgtctgctccatcgcttcggctcctcgagggctgaccttcagctttctctctttcgcctgcagcatcacccgcataattcgcaccacccgcaccaccctcactcgcagcacccctcccaccaccctcaccactcgaaccacccgtccttctcgagctcacacaacgcctcgcacccttcgccctcgcccttgcaccagcaggtcggcggcctgctcgtcggcaacctcgcagcgagcgtcgcggccgctgcggccgccgcgaaccagcaggcggcgagcgcgctccagaacggtggaggtggctcgggcggcggcggaggaggcggaggaggcaacggaatggcgcaccagagcccgcagccgcagcgggctggaaacgaggacacggtctggtggcagcagcagctggtgaagctctcggtgcgttcctcttcccgctgggcttttgttgggaggacgagggtgacgtcggctcgtccggccgaccggttgggtgccatggaggtccgcggcaggggcttaccccgtcatcctctcctgctctcaggcttgtcgccaggcgtcagcgccgcaccatcgggcacgggcggcggccatcaccggtcggatgaacaacaacaagtcagccatctcgatccaggacccgaaccggccgccgtcgaccaagccgtacctgtcgaacggctactcgcactcgaagaatggctcgatgaccaaccttcactcggcccaggacgacgtctcggacgacggcatgccggtcggtcggacagcggaccacccgggtgggattggcgcaccggcgacgccgcgaagcgcgagcgcccggccggccgaggatcgcgtcaagtcgaccgacccggcgtgggacggccttgaccttggcggcatgcacctcaaggcgctctcgcagtcgctcttcagctttgctcacatcaccgctctctacatcaactacaacaacctgacgtcgttgccgccatctatctcggagctccgcaagctcaagacgctcgacgtcaccggcaaccagctgacggccgtcccggctgagctcggtatgctcgtcacgctcaaggagctcttcctgttcgacaaccagctctcgtcgttgccgcccgagctcggcacgctccacaaccttgacgtcattggcatcgctggcaaccccttgcccgacaacctcaagctgacgcttgagcgggacggcacgtcggccctcatctcgtatctgcgcgactcgtgcccggtcccgctcccgccgccagaccgcgagtggatcacgatcgaggccgacaacctctcgctcgagcagccgcgcgagcaagagacgtttacgctcctctgctacaacattctcgccgagcgggcggcgacgagccagatgtacggctacacgccgagctgggctctcgcctgggagtaccgcaaggagctcatccttcaggagatcatgggctgcggcagcgactttatctgcctgcaggaggtcgaggacgagcgcttccacgacacgttcctcgaaaacctcaagagtgagggctacgagggcgccttcttccccaagacgcgatcgcggaccatgtcaaccgacgagaagcggcgcgtcgacggctgcgcgaccttctggaaggcctcaaagtgggtcgccctctgtgcactgctcgcccatggctcctcaggttgacttccgctcctcctttcgcagatacaacctcgtcgagagccgcgtcgtcgagttcaaccaggttgcgctccagaggcccgacatgcgcaagtcggacgacatgttcaaccgcgttatgtcaaaggaccacattgccgtcgtctgcctactcgagaacgcggcgaccggctcacggctcgtcgtcgccaacgtccatatggagtggagcccgaccttccgcgatgtcaagctcgtccaggcggcgatgttgatggaggaggtcgagaagatctcggaccagtttgcgcgcttcccgcccaagctgctcgactcaggcgagcgcgggccggcctactcggacgcgaccaagattccgctcgtcgtctgcggcgacttcaactcggttcccgtctcgggcgtctacgagttcctcgccaacggcacggtccctagagaccacgaggacttcatggaccacgtctacggcgcctacacgaccgatggcctcagccacaagttcaacctcaagtcggcctactcgaactgcggcacgctcccgatgaccaactttgtgccgacgtttcagggcgcgatcgaccacatctggtactcgcaggatacgctcgccgtcacgagcttgctcggcgaggtcgaccggtcctatctcaacaaggttgtcggcttcccgaacgctcacttcccgtccgagtgcgtctgccggtcgagcccattgctctcgagtgcctttgctgacagccgtcactcccttcttcttttgcagccacgtgccaatctttgccgactttaagctcaaggcgccgccgccgtcggcccgggccgtctcgcacggcgaccggtgatctctggccactctcgccctcctccgccgcacccatggtggactcccccttcttccttacacctgcttgtccgcaccgtccgctcctgtacacccatcctttctgcggccctttcactctcaccccctctgggcaactcttagcgacgttctcccctccccctgctcgtcgtcctgctcggaaggtcccccccccctctcccgctgtatatagcgtcgcccgggcggcgcgcaaaggcaggagggggggggggtctcggccgagcggccatggtcgactcgctgccagatcccccttcttgttctctcggccaggctgcggcctcgcctctccccgctttacacctctttatttctcgtagtcgctcgtaaccgctgtagtcgcatccattaaatgttcacccctctctgctcactcaaataggcgacgcgcgaaagcagactttggtcgtcaaaggtcatcaatggtacagtgtgggcgggaggtacaaggtcgagtgcgggccacagcctggcccgacactctcaacgctggccagctgcctgagccgcctccttgcggttctgcttggcctgcttgtcgcgcttggcaaacagctttgaccgggtcgcctcgcgcgagattgttttgctggaaggtagagaagtctcggtcagcctgcaggcttgaacgagcccactcgaaggatgagaaacgcacttgacactcttgttctgctcgacgtagctcatgtgttggccaccgctgaggccgaccatgctgccgacgctccgcttcgccgccggcaggccgtcgttgtcgtcgcgggcgcgcttgtttccggcgccgccagtgtagacgccgtactgagtcatgtcggtgtcgatcgctgcgcgcgactcattctggcggaggaccgactcgagcagctcaatctgctccttctgagtcgggaagacaaggtttggcagcttttcgagaccctcgaggcgcgtgatgactttgaaggcatagccctacataagcaggtaggttgtggacggtcagccgtctgcagcaggcgcggctcggcgcacaagccaagacatacctggtcgatgagaaactgctgccgcttcgtcgagtaaaacatctcggtcgtgtcctgcgagacgagcgagtagaagaaggcgttgaagccctcatcgtttcgccgcttggcgcgcaggatccggccgagccgctgcgcctcctggcgacgcgagccaaagtgactcgagacctggatgaggcaggtggcctcgggcaggtcgatactcgtgtcgccgaccttggaaaggaagatggtgctgacggccgggtcgttctggaagcggtcgaggatgcggacgcgctcgatctgcgaggttgcgccgtggatgaacggcttgccgagcttgatcgcgtatgtctgcgacgaggggaaagttgaaaccgcgtcagcgaggtgatgacaagcagcaagcaaggtatgaacagagtggcgtacctcgagcgcataaacgttgtccgagaagacgataatcttgtcgccgcggttttcgtggaactcgatcaagtactggcacgactggaacttgatcgggttcatgcagtgcagcaggagcttcttgcgtgacgacacccggaggtactccttgtagaactccggcgtcatcgggcaccagacctcggcacactggacgttggcaatgtgtcccttggcagcgaggtccatccagttagcctcgtagagcttcggtccgatcaggtagttgaggtcggtgatccggtcgtcctcgcggacgagggtggctgcgacaagcgaagcggcgtcagtaatgatcacagtcgacaccactcaagcgagactcaccggtgaggccgagcttggcgtgcgtcttgagtgtgctgacggcgcgccggaagacgtttgccggagcgacatgcacctcgtcgagcagcaggaagccccactcgcggctcgtcaggaattccatcatcttggctgaggcgtgcgaccgcttcgacgtgttggcgatcatcgagtaggtcgaaacgacgatgccagccgcgccagtgaactgagataggatgcacgtgtcagcgagtcatcgactgaagctgtcccacgagctggtctcaactcacggcttccttttcgtcggcggtgaagactgagatctgcttgtcctggatgttcgagaagtggaggaattgctgtttccactgcatgactgagacgctgaaagggggcaggtgatgatatcgtcgctcgaatcaactggaccagtcagcatcagactgggaaatttaacgcacgccgaggtgcagagaacgagcgtgctcttcttgatcgtgcaggcggccgtgatgccgacgagcgtcttgccggcaccgcagggcaggacaatgatgccgctccgagcgcgactatcggcacgtgagcgcaattggaggcatcagagatcagcaagatgcattctggagcgggcgagagtcggatgagcgcgcacccgttgccgaacatctttgagaggctcttctcctggtacggccggatgacggtgattggcttgaggtcgatctcaaggtcggcgttgacctgatcgttgcgaaagtcgtactcctcgaggacggggtactcaatgtccttgcagcgcttcttgaccgtctgcgagcggcgtgtgcacagggaaggacggtaagcttcgggtcgcgcaagtcaacccacgcccctcgagaggcacctcaatctcagtcggcttgatctcgatcgtgtggacgtcctcgtcctcgtccatgccgtcatccttctcgagtccgagctcgacgcccttgaagaactcgtcgtcgacctcacgtcggatctcgtcgtcggccgcctcctccttctccttctctgccgcaagccgggcctcctcagcctcctgctcagcccgcgttgacccgactccgttctggaccttacgtgcctgcttggccgcctctgtgcccgggatgacgagccctgcccgctttggcccggcctccctgcccataccaccgacgccgcccgactcgaccgtcgggtcgacctcgacgccagtgacgcgcgcattcttgatgatgtcgtcgcggaggagcgtctggagcaggtcgggccacttagattcgaggtagtagcggttgtgcttgaggacgagcttgatcttgccatagctcgcggtccaggtccggatcgagtcgagcagaacaggcgggatcggcgtcttggacagccgagcgaggacctcgatgatgtcggacgtcatcaggccgacagacatagcagcgtagagcgagtactcggtcaggaggtactcgtggatgaaggccggcctgtgggacggcgtagccgggcccagtcagtagcgcaccggctcgcccaaggctggcaacgacgcaccttgagacaggctcggcgaccgcgacgaggaagtcctgggcctgctcagcgatgggcgagaagccctccatgatgatggtgcccttctcgtcaatccagagcggccgcgaggcatggtccggcttcagctgaaagtcggagaggtccgtcgggaacatctccgagaggaggtcgtcgctaccgccgctgccgccgggggtcgacccgcctgggccatcgtccgggaactcctcgtcgaacaggatgatctcgccctcttgcgggacgaccgccttagacgccttgcgtgcgagtgccgaaaagttgatcttgaccttagccccaccaccagcagacgagctcgcacctgagccggcggcagcagcggcgcggcccttgcccttagccgagctcttcttgccgctcggccgccactcgtctggctcgggcgatggcgagggcgagtagaagtcgaggtcatcgatgtcgagttcggcagcaggctgtgcgtagccgctgccggtggcgaccggatagtcatccgaaacctcctcgtccgagccagctcgggtggtggagttgcgtagggacgaggggcctagaagagagagacagcgagctcaaggatcagctgctgctgccgtcgcctcgtgattgcctcgcatcctgtgactgacctgctcctctgctcgacatgatgtgcgctgagacggatgatggtcggcggcagctcgagagctcgcccgctgctgacatgacctcgccagcgacggcggctccgcagcgcagcggacaagagtcatcagcttgagccggcacgggcactggcattcatgttgcttccaacagctgcagacccctcggttgaaggctgcgtgcactacgaacagagtcgcggatgcccctggcctcaggctctgtcactctcgacgcgtgatgtgcgtcagggcgccctcttgccccgtcaagtcagagtcgtaacctgcccgctcaaacttccagctgagaggatcaacagtcgcagtgcgcgtgaaggggcatgatgtacaggctgcagatgatgcgacggaggcgggccagagggcaccgtagagacggagggcgtgcgaggaaggtcgtgaggaatccgtcgaagcgaagggaagcgtacaggccaggggaagaagagcgtcgagcgagcgccgcttattgcactgcaggtgagcagggtcggaatgccgaaggtcagctgcagaccaacgagggaaggggctgaaagtgaggaaagagcacgcacgcaggtggtcgcgccagtgcttctgcgagttggcaatgtagcctacccgcgtcttgaactgctcgcgcttctgcatctcgcggtaggggtgcttcatcgcgttcttggcctctcccttgttgcgagccttaacgacctcgccaccgcggccaaagtcgccgaaaccgccgcgggcggggatgagcgcctggtcggtccggccggcaatcgtccgcttctcgaccgggacgaggtcgagcgacgtctcgcgcggctgggatggccgctgcttgtagtaaggcaggagcgagcggtgaccgatccgccggccggagggcaggacgagctcaaacgtctccgggtcaaacgtcggcgcgtccgggtggtcctcgtcgagcgaggcgtccgtgtagtcagagcccatctcgtccgactcgtagccgtcatcttcgacgacctcgacgtcggagccaacctcttcgtcgacggccatctcctcgtcctcccactcctcgccctccttgacctgctcgagcgccttggcgtcgacgcggcgcttgcgtcggcgcggtgccggaccggcgtacgaagacgagaagtcgtagtagtcggagatctcgagcttctctgactcggagctataggcgagctgcaaagcagtcagagggcggaggggcaaggtcagtcggcggcgcgagatcctgatatcgagtccacataggcgacgtaccttgcagtgtgacttgtcaatcatgtgcttgcggacggcctcgagcgtgcggtactccttgcccttgccgttacagctgaggcagacgttgccgatcgaaactttctctccgaggtagagaaggaggccgggcaggtcgacgaggtattcgcgatccgggataaagaagccgtgctccttctgcatgtggcgggccgtctcctcctggtcggcaaagggcgtgatgctgcaaaagaggcacgacgtcggcgtgagccgcagccgagcgtaggcaatcttgcggtcgatcgagtcggcgagttcctcctcggtcgcgtcggggtcgacggcgagcgacggcgcagcctggtccgggtgcgggtggttgtggtacgactgagagtgagcggcggtcgacgacggaacctcgtcgtacaccggcttcgtcgggacgtgctccggcagcgcattctcgtccttgggcgcctgagctgcaagcatgctctccttgagcagccgggtcgcctcctggacctcgcggtcgcgatgctttttgctctcgacgtgcgtgtggtatgcgccctggctcgcaaagctcttgctgagaggcgggggtgggagctgagtcagtcgcaagcgcgccagtgggtcggacccggtggcgacagcgtccgagccggccacacgaagagaagatgcgacacttacacgcagaggtggcaggtctcgcccttcttagtcgcggtaacggcgttctcattccggcgctcgatgaccttgcggttgaagagggcggccgtgacgggcgggagcgtcgccacccgacgctgcggtggtggcggaggccaagaatgacggacggaagaaaggtcagcaactcgacctcgacggcggagcgactgcgagcctgagcggtgggcaggcaagagcggtcgcaccttcatgttgtagcggtgccagtcggaccgcatgtggtcgcgctgctcgtctggcgagaggaaggcgacattgcacgagaggcaggtgtagagctggtcgtccggcccgagcgacgagatctgggtcgagtttgacggtaccagctgcgagatggccgaagcgttcaggttgatggccgccatcttgagaagagggagaggctggaggtagggagggaggggtgttggtcaggagctcgggacagcagctcagccaggacgagcaaggcaacgctcgcctgcgccctcgcgctgcgcccaaattcggcgagccggggcgcgaacttttctttttcttgtgcgcccctccaccgccggctgtgcgtacgaggtggccgtgccacatatcgagcgcgcgcgtcgtttctcgttcgactcccggagccggtcgccgggccgggccgaaactcgttcgacactatactcatcgtaccattgcacggtcggacgctcaagtacgcagtcggcctacactctctcatttcgtgatcccagacttgaaaccccctccctctccatctactctgcccaaccctcatccccgacgacatgccttccgacgcccgtgtcgccaaccgcatcggcgcttacgccaagttctggcagagcgactctgtcgcagacagccagatcgacaaagacaatcggctcatcaactatgaggacgttgtcaacggttcgtgccttcgcgtcgcacgtgccgcctatctctccctgcaagccagccgctaacccctcctgtcttgcttcgtccaggcgtgagttcgctctaatgcttcgtcgacgaatcgagagtgctctgagcggagtgttgctttcctagacgtccggctcaggagctatcctcgctgctctgaaggtcagaggtcttagatgcgagtgctgacctttacatcccattgccgctctccagtactatgacggtggtaattgtttatcctgctgagccgtttgctgctagatcccggacctaatgcaccagtttccctgctggtcagcaaccgaactgtacgagtacggctgggctcagtcgttccacatgtgccgcttctaccccggtgaggcgttgctagctgctgtacgtccttcactttctacaaagaccaccttccgctggtagcaggctaatctgggctgattcatctcatgcaactccctacagcttgcccggcacgagcactaccttgccgctcagctcggtctcaaggctggcatgcgcgtcctcgacgtcggatgcggcattggtggtcctgcccgcgaaattgctcgcttctcggacgcgacaatcgtcggcctaaacaacaacgactttcagatccagcgcgcgcgcaagtacacggccaaggccggcctctcggacaccgtctcctatgccaaggtacgaggtctctcggtccttcgtcctcgctcatgcgcttgtcctgaccttgctcgatttctttcttcgcctgttcagggcgacttcatgaagctctctgagcagtttggcgagggctcgtttgatgccgtctacgcgatcgaggcgaccgtccacgccccgtcgttcgagggcatctacggcgagatctttaaggtcctcaagccgggaggcatggccggcatctacgagtgggtcatgacggacgcctgggaccccgagaacccggagcacaagcggatcgcgcatgggatcgaggttggcgacggcatcgccgagatgcgcaatgccaagaatgccttcgacgcactcgttgccaccggctttgagagtacgtcctctgggcctccgcatccgaggtgcaagcttcgtcgctgacctacataccctgcgaccctctagtcatcactgccgaggacctcgccgaccgcccggacgccatcccgtggtactaccctctcgagggagacctgcgcaagtgccagaccctctacgactgcctcaccgtcttccggacgtccaaactcggccagcgggtcacccagaacggagtctgggcgctcgagaaggtcgggctcgtccccaagggcacgttcgaggtcggagagaccctccgtctcgcaagcgcggccctcgtcgagggagggcagcagaaggtgcgcctccctctctgcaacgcctgctgagcggagagctgacttattctgctctacctcatctagctgttcacgccgatgatgacctacgtcgtccggaagccgctttagataccccttgtcgtcgaagcgctcgtgcctcctcggtcgcgttttctcggccttctgcaaactcagacgagcattttccatgccagaacgggttatatagatgtctctgaaggggacacgagcgaagaaggggtcagcgaccagaaagacacgaagcgaagaagagagccagactcacgcaggcgacgggcccacctaccagtcctcgtcctcgaggccggcacccttccagccctctggctcactctcccactcgtcgtccttcatttcgatctcgtccatctcgccgccaccgacgtcgccgagtccccagacctcacccttgggcttgcggtcggtcctccgcggttctgccaccgaccgctgggcctcggtgacgggaggcggcgtcggcggtcgcggtgccgacccacgcttgctcttggctgaccgaccgctccggccgcgcggggcgagcagcgaggcaggctcgggtggctcctcctcggacggcttcgagtgcgagaagatggcgcgaaaagtgtcctcggtccgcttggccgttcgcgcgctcgcgatctgcggcgaccggagcgacaggagggcgagcagatgtggtggcaaaccttgcgtctccttcgccatctgctgacgacgagccgccgccgccgccgagtcacgcttgccgtcgtcgtcgtcgtcgtcgttgtcggcatcggcatcccaagtgtccgagccgtcagattcctcgacaagcgtccgggggtcgtccccctcctcggcaaaggcctgcggtaagccgtaaagcgtgttggccttcttgcgcgggctcgtgcgggtgagatagccgtcgggtcgaagatcgtcgtccaggtccgactgccagaggccctcctcgtccgggtcgacctgcgcgtcatcctcgtcgtccatcctagagtcagccgcggcgctgcgcttgcccgccgctatcggcttgacaggcaatggatcgatcggtcttcgcccgcgaccggtccggttctggccagctttgccgagcaggtgcgatttgacgacccgcctcaggatctcgtcctcgctctcctccgagccttcagcctcggcctcctccccctgcatgcgcgacgccgcctgctcggccttggccttggccgccgccgtcatgttgattttgccgaacgacggtgcgtacttgcgcggcttctttgctggcgcggctttcacagcggcggtcgctggcggcggcgttgctgagcgggcagctttcgaggtcgaagtcgaggattcctcggggccggacgtcgtccactggccgccgtcgccggtgggcagcggtacgccgcgcgaagacgatgctgaggaagcctcgctcttcggcgcgacgagcggggtcgtccggttcgtgaagaaggggtgaagcgtcgtgcccgtgctgccttcgatcgaggcggcgaccgacgacttgccaccggcaaagagcattctcggtttgcccgccagggtcgccttgcccttgcccttgacgtcggccgaggcgtgcatcccgtcgtcgtcagaggacgacccgccctcgtcgtcgagcagcgacggtgcgacaggcagagctcgtcgaggctgatccgactccttgagcggtgtcggagcaatgacaatctccttctcgtcctcctcgaccgacgtgggcaacggggcacccgctgaggacacagcagcagagttgtcgtcggacgcggcagctacgcccccggcgcccctccgccgcttgactggcgtgctgcccgagccgagctcgccattgaggcgcttgcgcgcctttgtccgaggtgtccagcccgccccgctcgctgcgcgaagcgaagcggcgtcgtttggcgcgcccgtcgtcgagtgcgacgagatgagggcggcgagcttgttgggagacagcggatgatgataggctgaggaggtggccgtcgacgacgatgccgacttcttcttcggcgtcccatcagccgcagccgtcgccttggacaggaaggaggacgacgagccagatgccgcggccgatgacgggttgagcggggagcgcttgacgggcgtgcccccgacgaggaaggggtttgtcgccggcgaccgcttgacaggcgacataaaggtcgcctgcgcgctttcggtcttgaagcgacccaacttggacggcgtcaatgagggttgtgtactcgagcgcgactcggccgttggcggcggtgagcttgaccgtccagccctcgaacgagaggagctcgcggccgatggcggcggctgccgtttgctcaggtcatcacaggtggttgatcgagaggtcgaagctgccggctggccggcgccagcctttcgcgacttgttgtaggttctgtacttctcggctgagcgttcgccggcggtcgagaggcgtcagcacgaagaccgaccgctggcaggctgctgcgaggagcacgacgggcgggcgcaccgatcaccgcgtcgctcttgatgtcgtcctttcgggggtcgcggccgtgcgtcgtcttgaaggcacgctcccatgtcttgaggtcggccttgatcgtcccgagatcagccatggcgaggcgaggcggcgatggggttgacggatagaggcagcgggacgcgtcgctcgaccttgggcgcgtcggctcggcgggctgccctcctccttcaaccaccagcaccctctccgcccagcttgcctcaacacgcctccttgtcgaggctagctcgaggacagtggagtcaaagaggtcggtccctgctccaggaggccctgcgccggccctttgctggtgattgtaggctgaccccgctccgcgcagacgaccctcgctcccgctcccctccgccgccgtagcgaccctcccgacccatggcatccgagcaggtccatccgctgctcgaggtcggctcgtccgacgacagcgactcgatgagcgaggagtggactgcgaccggtcctcaaggccacatcaccggcgcctcagccgctactgtcgcagcgattgcttcggcccccttcccgcgcctacccggcaccggcgacggcgcgcctcctgtgcaccggctgctgttcgtcccgccctcgattccggacctcatcctccggagctcggacggcgaggagttccaggtccgcaaggcctacctcgagatggcctcaggcgtcttccgcgacatgcttcagctcaacgccgactcggccgatgtcgaggcgggcgccggcccgcgaaagcgcaagcggtcgtccggccagcagacgtcgctggcggtcaagatggcggcggcggcgatcaagcgtgaggtcaagaaggagggcagccgggacgtcgactcggacgatgagggtgaggccgcaggaggagaaccgatcaacgctcggatgaggacggcctcgtcctcgccagaccccgtgaccgactcggacacgccggtcgtcgatgtgcacgacccggccaaggacctcaacctctttctcattgccgtccaccaccagttctcactcaatgagagtctggccatcgaggaggtcgagctgtgcgtccgcccgctctccatgcgctcgccgacccgctgagctgacgccgccttcccccccttcaagactgctgcgcctcgccgacaagtacgagtcctcggccgtcacccacctcgccttcttccacctccagccgctcgttccacgccagtttaaccgggctctcgcgctcggcacgctctacaagcacttcaacacggtccggctcgccattaagtaccagcgctcgagcccggtcaagatgaagggcatcccgcaggatctatttgtccagctctcgagcacgcagatctatgcgctcctccaggtcgaggccagcaccagccaggccaactaccggagccccgactggccaaagctcgcaaaggacctcggcatcgaggtgcgaccgcgcgcaagcgggcctttctcgacgacacagactgacctttgcttccctccccttccccgccgagcagctcccgcagtctcattgaagacgcacgcgaccgccatcctcgaatcgtccgacttgactgtctgaccaaccggcgctcagccatcgccagccgtctttccctttgtcacaatccctcttcctaggtctcgctttctcttgcccgcttctcacttgcaacgatttcacgaccaccccttctgcatgcccatcttcgagtctcgccgtcggctggctctgaacagaacggtctctgagcgccgagagcacgtgccactttctagatggagagatggtcgcgtgcagaggtcgtcattaagagcgtgacgggtcgtcgttgtcaggggcgatcaagaatgggctcggagggccagcgtgaggttcaagagggaaggggttggggagggcagactgcgaccggcgcgtcgcatagcgcaaggacggaaggtgaggagcttaaggcatgatggtaggaggaggcgagcggacgacggtcgactgcgtcggatgcggcgcaatggctggcgtcggcagcggaacaccacctcgagcctgaacgacggcgatggagccgacaaggacctcccaagctgcaagacaaagacaaggcgaggtcagcacgagttgctgcggcaaactttgagtgaggagggcagactgaccagtgtcgagcgccttccagaggaggctgtcggcgacgccgagcgcgcagacgttgccccagacttgatgaacgacgccgacccgttcgagcagagcgcggaggtccatcgtctgcgacatgaaggccgtaagttcggcccgggtctttggcgtcgcgtactgcggcaggggcggcaggttgaggagcgacgagaggaggatgtctggccgctgcgtgtagaggtaggtgttcaggaccggaagcgtcgccgggcttgggagcgtgatggcgatgactggcagggccgaggcgggcagtgaggccgaacgaggcgggatgggcggcaggtgggcgcacatcgaccggtagatgaggtcgtggatcgggaggagagcgccttgcgagtggaggacgtgcagcggagcgccgggcgtcgctggcggcggccgaacggcgagaacatagtttggcggcagcgaaaacggcgaggacgggtcggcgtaggcgggcgagttgaggtggaagttgaggtattcgggcagcggcggagcgagagcttggtgggctgagccggtcggagggagctcaagccgggcggcgagcgagttctggaggagcgacgggccttgctccatcagtcggtccatgacgtaggggtacggctagaggagggaagtcgggcgggtcagcaagggccaggccgaaagagttggttgatgagacgcacgatgccctcgagctcctcgacggcgtggacgttgatgacggccatccggttcggcctcggcagcgagagcgggaggaaggcgcttccccggtcaaagacgacgggtccgtccgctgacgtcgcctccccttcgacgagcggcgcctgcttctcgatcttggaggcgaccgcttggagcgacgggatacggaggccgcgcgtcctggtgctcgggccggtgacgttggtgaccgacttgatccgccgcttgggctggccggacgacgacgacgggtgcgacggccgatcataggggctcgagttcgagaaggccggcgacttgcggcgagacgaggacgaggccgatgagccgaggacgggtcgggaaggtccggctgagggtcgggtcgggtgcgagttttctttgtcgaccgaccagtgggaaaaggaaggcgattgcgggtgtgacggggcgtgctgggcgagcatcatggtgggcggtgacgtcggcaggcgacggaggcggagagagagggtggagtgttgagtgaggcggccttcggcgagcgatggtaggctgaggcgagacgggacagtcggcgagagggctgaaggtcaggtggcaggggtgggaggggtcgagggaagagagggaagagagggaagaaagggccggccagcctgccctctttataagggcaagcgatcagccaacccctcagcgaggagcgacagggcgacagggtcgaggaggccgctgaagggtcgtcgtgtcgtcgtgtcgctcgggaaggggcagtcggtcggagccaatgtgcccctgagcgacgacgtgaacgcccgacggcggcctgacgtcgtcctcggcctcgtcgcgtgatcccgttgcatgcgcgtcgcacgaggaatggtgctaggcgacgagaagcatcagctgctcgcaggtcgatgctcccgcttgcctcgacagcttgaggtcagccgagggggaggaaggtagccgacgcgttaaaggggtcgtcgccgtcgaaaggtggagtgcgctgctgctgcgcgagcgctacgagcaacggccggtcgacagccagggcgacaggcctcttcttccggtcgcctggccagcctggcgagactgaagcagtctggctctcgaaagaaatcatcgagtatgtactaatttgatgcgagttgagcggataggccgcttttatgggttgccggcggcaggggcggccgcgggcgcggagctttgcccttcttgctccgcgcgaccgccgaccttctgcagacctatccccttgtcactcacgtgaagcccgaaccatcgaagcccgaaccaggttggcggagctgacctcgccgccggttgatgcattctacagagccttccccgagggcgagcggccgaccgacctcgtcagctcgctctcgttgcccgtcgaaggcaccaggcgcgtcttgaaacgattggacttcggacgaagttgctcggtcatttgttgcgtttcaccggctgcgtcttcggcgacgcttccatcgagcaagttccatgacgccaacccgcctttttcgtcctacaagacgcagccggcgccagccgcttcgtctctcagcctcatacactcaccaccccccccactacccgagggggagggggagggttgcgcagcagccctctctcgccttctgatgcgtactcgcattagtcgcgcggcacatgcacagcacggggcggaggccgcgagtcaggccatcttgatgggtgtgtcagcaggtgcgagctcgcagaaggaaggcgcccgacggcgcaactggtgcggttgagaaaagaacactgttgcacaacaagcaaaggagaggaaggacgacaagccagggatgcaggtagccaaagggtgcgggagagagggacaagacaggaagacctgatgagggcagcacgaaaaagaaaaaccctccagccgcccatcactcggtcttgccgtgcccgttggcgagcaccggaggcggcggcggcagctcgctgacgatcgacgccggcgtcggcggggccgtgtacgacgatcgtggcggcgctatctgagggatgacgtcgtcgttctctggcgtcgtcgagcggagagccgatgaaggaagcgaaggccgatggcggaggagcgtcggaaggaactgcgagttcgagctaggagtgaagcactggcgggcaggaagaacagatcagcaggtagtcaaccgcgcaaggtcgaaggcagcacgcaccgtctgagcctcttgtgtaaagacgccctccctccagtcggcgacctcgtcgtcgttatcgtgcttcttatccgacgagtcgcccttatagccccgacctccgacatcgggcccatcgtcggcgaacatcaagctcgcccgacgcgaaggtcgaccaccagccgcctcctcctccgtctcgatcgtgtaggtcttgacctcgcctctgctgcgctggccgttgcggcctttggagcgccgagccttggcttcggcatgcgacgcccgccagtcgcgtcggcctgccttggtgaagagcgtgttattcgggcacagccggccgatcgatacagcgagcgggccgccgcagccggccgaggtcgaggcgtcgtcggcggtcggatcgtgagaggacgtccaagagaggtcggggatgatcgaggttgtgtgcgaggacgagccggcactctgccgcggccgagggacgcacgtccagaggacgacaaaaatggtgtacctgtcggcggagtcagacgaagaacgtcagcggcgaacgaggcgaatccgggggggtgactagggggacggacaaccgagggagggacgatccggcggccgaagtccacgacttgccctcgataaagtagaggacgagggtgaggacctggagaaggatcgtcggcgagccattgcggaggccgacgtagactttggtcgaccagctcttgagccggcgctcggcgtcatcctcgtgtcggaggtgccaggcctggtcgttcatcgaagccacggtcagcgtcactcgcgtacagccggcatggccgccatggctagacgcacccgcgcccggaggagctcgagcgagaacaggtaactctgaagcaagagccaagccagactgagggtccaggagaggatgcgcatcagcgggtaaagcttgttgtaccgccgatacgtcgcagccgagagggcgatgctgcagggtgggcaagtatgtcagctcggccgggccagcgccccccccccccgcctttaaaatggaatgcaaaaggtaggcgcactaggtcgggaacgtgttgagctccacttggccgacaaagccgcacgtcgctgacccgaggacgagcgctgtgctgaagagcgtgatggctcggcgccagacaaagagccagccctcgagcgaacggatgaacaagtggctgcgaaccgtcaggtaaatttggcagacgaagacaatgtagacgctcctgcagcgattggagagtgcaagagtcagcgctaacggaggggagaaggagggaaaggtaatgcacgcacgagaagaacaagatgtggtcctcgacccgggtgtggaagttgacgaggtagagagcgtctccaaagtgggtgacctggggaagggcgggcaggacgggagtcagcatccccagagggccatgatcggtccagataagggcgcacatagatcttgatgacgcgcgagaggtcgagtgagacgtcggccgtgttgaggaggaaaaggaagattatgaacagccgctccttcagcgggtttgttcgcagcgcaaagaggtagttggggacgaggatgcagatcgtcccgtagcagacccagctgtcggtcgggcgccgttgcggtcggtcaaccgcttgctaccgagcgaagagcgagccaggacaacgtacgagatccagatgccgatgaagatgggcgcccctcccttggcggcgatgagggcgatggccggattgattggctggctcaccgaggcggcatcgtagccgaggtcgagagcgttcatgacagccgctgcgagcggtgtcgaccgtggtagatagagcggaggggttgccgtcccggcgatgaccgagctcgtggaggagaagcaggcgccaggcgaagaaagtcgatcgaacagggactgctcggtaacggcaaggcaggactgaggctggggaggaaaagggtcgtggtggtgaggcggaaggaggcgaagctgagctcggcgaggtgcccttcctccgcgagaccgaggccgtcctcaaggagccgagcgagcgagtctgccaaagccgaccgaccaggcgccgccggcggcgaacgagctcgagcaagggccgatgagacaaggtgcagagagtttaggagcgaaacgccactcgctggccgcctgcccgtccgaaatgacggcttcaggcgattgggatctcgtctgaagggcgggagcaggtgacggcagcgtcgctctgatgatcattgctggcgtcagactcctgagctggcgctctggagaggaagcgggaggaggacaccgaggtcatggtcagagggaccagagcgtcgggggagcgcagcagctccttggctgagcgacccaggcaaggaccgcttgccgtcctctagagcatgcttccatccaagcagagcagggcgagctggcagagagcgtgctcccagcgcagggaggtatcttccccaggagctgagatcgaaggggggtcgggagggtgcagggccgccgtgcaatctcggcggcgtgtcgccatcagcccgcgcagagctcgtcctcctgtcgccagttccctctcaacagcatctctcgtcttgaacgatactcatcatggctaagcacggatattcaaagctcgctactcatcctacaggctgacctgcaacaagatgggccacgtcttcgggcctgccggttagcacacctttgaagaaggtttcggctcagcctcgccgctgtctcatcaaacgcctccctcggcgaggtctggcccacttgtctgccgaatggcatccgaaccatcggcccagaggcagctcgtggccctgaggtgggcgagcgggaagccgcctccgccctcgccctcgccctcgccctcgacacctatctctcactgctgcaggctcagcaagctgcgacgagcacctagctgcgcctcccgcacccatcgccacttggcccaaatctcaccaacactcccagctccgagtccagccgccgtcaacgccgatcggcgagagcgtcacctcgcctgcttctggccagcagctcgtagccctcctagtctgccgctgcgcttgtcaacactcttcagagccctgcgacgcgacatggctgctctcaatcacccgctggtcttcagctttgatgagatggaggtctcggcggcgacgcgcaagctctttgcagtccaggtgtcgggcgccttcatcatgacggacactgccctctcctggatcctctatggcgtcgtcacggtacgcctgctcgctcccagactgcttgctgtgccaagtcgctgaccgtcacctggatgcttcctcccgcgcaggtccagatgtgcaagtaagtctctcgtgaggaacacgatcatcgccgccgctcgagttgacgctcagtctcgccccgcctgcagctacttcagcctcgtccggaccccgaaaggacgagggcgagaatccctttggcagggtgcgctgccacgtcgtagaagccgcattggcgcaaatttcctctgactgatgtcttttttgacctggcagtcctcctcctcggtttcgtctgggtgctcctgacggcgacggcggtcacgacgctcgatcggagtataaagagtgcgtcgggcaggccctgggtgctgcaaagcgacgtcgagctgacaccgactgccctacccccagtcaactcgtacaactttggcgacgttgtccgtccctcttggcgtcagcgtctcacaatcggcgaggaacgctggctgaccctattgctctgctgcacctgagcagacttggaccgacaactttcacaaccggccgcacaacctccaggtcttcgtcctcggcgccgtcaccatttgggctatccagagtgggtccatccgtttggttgcccttcctaccgcgcatgctgacgcatacggctgtctcgtagtcctcatctccgctcgagggattgccttcgccaagtcgatcacgcccgcaggccacctcggctggttccggcaggtcagcaagtgggtagggcttggcacctgccttgcctggatggtttctggagcaatggctcagtatcagtcagtccatgggcgacctctcagccctctccgattctctggcctccttcactgaccgttgcgcccaactcgatcccagcctttaccagtacgagacctagtgcgttcgcctcggcggccgccaagccgactcctgtcgctgactgacggtgttgacctgactcatggcagctccgagatgattgaagcggtcctgttgcaccgcacgcccaagtttctcatctttcagagtgcgaccctccgtccttttgctcgtccttccgtcagctaacctcgttcctctcccttctgcagtcttgtggctctctcttggcttattcggagccctcattatgacggccaccatggcccgagacgtcgtcgaggctcgcgtacgtcacttaccccctcttgccgcttgcaatgcagggctcccacctgataaaagctcgcccttgcatcgacagcgcttcaactcgaccaaccatccttcggtcaagctcacaaacgcggtcctcatctcgctcctccgcgcgatgctcggcaactggatttacattgtcagtacttggatgaggcttgcttaacctggcggctttgttgatgagcctccttcgtcctcgttatcgcgacctagtgcctggcacacgccatctacatcttcggtccgtcgagccgcgccgtcctgcgggtgtagctgcccttgaactgaccaatcccaccctccgcctccagccgtgctctacaggcggtcggccattgctggtcgagggaccgcctgtctgcctttaacctgggccttctcgctcctgcgcatgatcgccgccccgcgcgacacccggtcacggtaaagccgagcgctacctcgaaggaataagaaagtcatatctgacaaaaaccgcgcccctgcatttgccagtcagctgatggagagcgaggaggaggatctgccgcgggttcttgagcgttctcgctcgcacgccttggcaggcaagcggctctttggcttcggcaagcttaattcgaagcggccagtctcagccgttagcacgacggccgactcgcggcccgagctcggcttcttctctatgctacggggcgccggtgggctgagcgggccggcgacccgtcgcgggtcccttgcggtcgaggagggtcggaggtcgtttggcgggtcgagcggtgcccgaaggcgaaggcggagcagcgtcaaggcgacgctgagcgggatccagcggtcgaccgaagtcctgacgtattcgcggagagagaaggagttccagctgctcgagggcccaaaggtcgacgtgcaggacgaggacgaggagaagtgggtccggaggaatcacctgctcgggatcggcaacgcggtcgtacgtccttctgtttgagcggcactgctcgctcccgggctgactacgtcgggactcgagcacagtgggtcgagactcccggcagccgccgacctctttcggccaacgagcactactcgagcccacagctctcgccgggtccggcgtcgtcttccagcctcctaccgtcagccacgtctgccagcccgagatcgcctcgccctccgatacagcggcacgcgacgtcgtccccctcgcaaaggtcgtcagccgcgcggacgagccgcttcgggaccgtctcggcaccggccgcccatcactcggcagcggcgggtccgagctttggcgctgacgaccatgcgatgcactctggtcagcggcgtgccgagatcaccttcatcgactcgttcccgaccggaccggtcgtcagccagtcatacggcaactagtcagttgtcccgctatctcgtctcctacaacttgcgctgattccctttccccagtgaccccgacctcgacgtgtttgagctctcgccgctcggcgtcaactcgccgcagcagactgtgagatgatgatgactgtcattgtggatcgaatcgaggccgcttcgtctcgcaaccaccgccgtcgacgatgtcgtccgtcctgggtctcggcgtatgtagagtgaccggggagagggtaggcgaggccgcaaccgaggcgaatggcagttcgcttgctggagtgctgttcagcagcgaagcgagcgaaggtagcgaggtccgcgggggtaccgatggtgaagcgtcgcgtctgccgctcgggaccgcgaaagatccggcatgcgagctggcggaagacgaggcggaggcagcttgtgcgaatgcgactggcgtaggcgggaagagggatggcgcccgcctccgcccgggtagcgatgaaagcgtctcttcttccgcgccgctcgccggaagaggtatcggcctcacagcagacgacgccacgagcgaccagccgggggtgaacggcgtcggaaccggatctggcggacggccgacgtggctcgggcttgcttcgggccgagatgagagcggcacggagacctcgcggagggcagtcgccagcgggggtagcctgacggctgatgatgaactgcccgagggcgaggcaggcgagagatgcagctcgggcggaacgccagccaggccaaggtcgagttgaccgaccgccgaccgggtcccgaacgaggacgacgcgatgctcagccgtggttcagattggctgctcgaggccgctgccgctggggtgtagatccgacctccagggagaggtggcagcgtccggtccgtcgaccagccgacaatgctaccgagaccgacatcgactgaagtcggcaggtggattggctcgctcggcgctgggctgacgagtccttgcggtgagaggtggtggcctgccgcccctggtccccctcctcctggcttctgctgctggccgaggctactcgccgccgaacgcagcgcggcagccgcctcggccgacgctcgacggacatgctcgtgtcgagcctcccaagctcgggcgagctgctcatcctcagcctgcttcgaggcgaggagggcgagcagggccgagcggtcctgctgcggatgagcggcgtacgcagcgaggacctcgaggagggaaggcggcgggaggagaccctgatctgcgagtagggagcggttgtaggacggacagagggtcaactggcgggctcaggagcgaggcgtacgtggttgagggaacggacgaagcgggtcgtgcgaagtggcgggagccgcaggcgatggcggcggcggcgttgcggcggcggccctggcggcggtcgaagccgacatgcctctgcttccgtagagacgagatgagaggcgctgctgcttccttccgagagcaggggcgctggtggaggtcggcgaggccctctcacacttctcctcttgctcgtcttccaagacttccagagggaacggagccttggcaaggcgcagcgtcagcaagggcggccggcggccccggcctcgagcaacggctcgacgccggcgccgccttcgcttctgagctgcttgtaggagtcgctcgctagcgacgggcgcatcctccgtccgagccgacatcggaacggcagagcaagagacgacggcagaacggacgagctggcagccgttccgacgggcaagacgggcaaggccggagccgagcggcggagttctcgcgcagacgcctcatttgcgaaacgacggcagttgtccttcttgactgttctcaaccatcccctctctcgagcagtctggcagcccggaagggcagaagcttgcacctgaggctgggccgcaccccatgcaggagtctggacgagatcgctcgggtctgcagtctctcttgccagctcgatccttgctgcgcccggcctctcccggcggcggcttcggagagacggatcggctgcgggcggccctccgttgcgtcccccttacctccttccgccccgcacctggcttcggcgactgacgtatcgcgctctcctggcagagggcgtctgaggctgattcggaaagtggctcactcacttttgtataaaacggcgggcctcgttggcttgcccggccggccgctccttcccttccacacctcccacctgccctcaccaccccagcctcctagcatgaatccaagcagcatcctcaggtcgaccagctcgaccctccctcgccagctcctcctccaagccgcctcttcaacccgctgtctcgccgcccgccggtcatacgcgtcccgcaccacaccggctgccgcctcagcctcgacttcggcgaccttgacggcccgcccgcagacgacgagctcaaccgccacaatcacctctacggacgcgaggctacacgatggtgcacaatctgaaggccctcacccgcgaggtacgattcacgtctattgatcctccactgcccggctcgccaccttgctcggggcttaccttctcacccctcccttcctttctgcagaccagacgccgatcgtcccttccacctcgagcacgaccgactcggcctcgctcgacctctcgacgcccttccacgggccctggacgctgttttcgcccgtctacacgcccgccgacctcgctgccgtccgtgtcgtccgccgcacgccaacttgcctgaccgaccgactcgcggccggcctcgtcgcgacccttcggaagggcttcgacatcgccagtggctacaggcatgtgccgatgccgaccgaggcagagagccagggccggacgtggacgaccgaggagcttcggaagcgcgggtcgacgatgaccgaggaccagtggctgatggtgcgtccgctggccaccgccaatccgcggctaggtgctgactctcgctcgcctgcctcggatcgcagcggatcatctttctcgagagcatcgctggcgtccctggcatggtcgccggcgcgatccgacacctccactcgctccggctcctgcgccgtgatggcggctggatccggagtctcctcgaggaggccgagaacgagcggtgagcccccttcatcttctctgtgcgcagaagggtgagctcttgctgacatgcttatccctctcagcatgcacctgatgaccttcatggccgttgccaagccctcgcgaccgctccgcgccctcgtccttctcggccagggagtcttctacaacctattcttcctctcgtacctctttgcgccaaaggtcgctcaccgcttcgtcggctgcctcgaggaggaggctgtcgtcacttgttagtcccttgcgctgtcggccttcactctgcctttcaaaccagctgaccgggcgctcgtctttctcctcgtacagacactcgcgcgatcgccgagctccgggctggacacctgccgctctgggagaagacgtgagtggctatcctactggactcgcaccgtgcaacaaccgccgctgacaccgccacgcatgatctctcgctcaggcccgcgcccgaaatcgcccgcagctactggcggctcgaccaaaaggcgacgatgctcgacgtcctggagaatgtccgcgccgacgagtcgaaccaccgtttcgtgaaccatacgttggccgagctcgaaccaaccgattttaatccattcgcgcaggccgagccgccggcgctcgtcaaggggaccgtcgccggctttacgcgtgccgaggccgggcggttcgcacgcgactcgcgggtcgcgctcgagcggaagggtcggaaagagggcgagcagcaggagggcctgcagcagggctttgggcagccggctgagtcacatacgaaggaggtcgcttagacgtcggcgcgctgcgcccctctctctcccttcctcgacgcccgacccccttttacgacctcattcacgcctctgtgaccagcaccctgcactcttgtctccctcctatgtcctgatgacctttcagtacgaccttgcctacgatgctgacagtcgctcgtaccgtacgtgtgcaatctggacgactcgctaggcgcgcagactccgtgcagcccgtcatcctggacgctgtagagcgccgatgcgttgggccagtcggcggtcgacaaggccgccgtctaaagcgagagataaaggccagcatgtctccctctgcttggagccggggacgggtcgagacgaaggggtgcgttgccgcacgagacatgctccccgcctggcagtttcgaaggagggcggcgggcgttcggcctcgatcgcccgatggaccctggcgccggagaacgcttgccttcccttcgtccaggttctctgcgctgggaccggtcgtcggcgggcagtctggtcggccgctggcatgaacgagaagacgctccttatatggcgagtgagaagaatgaacggcgacagtcggcgccggccgaagctgcggcgacagctcgagggaggagctgggctgctgcggtgtgtggtcaatcgcgccctgcttcgccatccgacctctcgctctctctcgccgaacatgatcagccgtgagactagtacgatgcgatatgccagctccttctcgcctttgtcttgatgcgagcgagatggcggagcagaccaaaaggcggccgaggtaataggtcgtcgtcgcgcgcgcgcagagaggggcctctccttttccctcccttggtcgccctcatctgcaacctcccaccgccctctccatccgcctcctccttttctcctcatcgagcagcagtctttagctcgagggtcctatcatccaagcgccccgccagacgattcgcgcacttgccgccaccaagagcgagctagagcgagagagatccgacgccgcctcgcccaggccacgcgcacccctcgtcggcctccggcccgtcgccgcctgttctcttcctccggccgaccgtccgacctcgccctttccaaccctcaactctctctctgctcgacgacgacggacatccatcctctacctgacggccaactcgaggccccgaaatggccgacatgaactttgggagcagcgcgccgggcgcgcaggccggggcgaccgactgggccgcgctccttgctcagcagcagcaggcacaccagcagcaactccagcagcagcagcagcagcagcaacaagccggtcagaaccagccagggatggacagtcaacaggtacgtctcaacacttctttggatcgagctcacaaggggtaggagcctggccgcgcagggtggaggagaggcggcgccttggtcctggctgtcaccccgacgccacggacggcagagcgaggcctcttccatcgaggtctcgctcgctactgcctactaaggagcccttcatcgtcgccagagggtctctctcagaggcgagcctcgagacctggcagggtgcctcgcctcgcgaccccgaacggcggggcctccctcccgagctcgcgcgcccgcgcgcccgcgcgcctgggcctttgggcgcaaggaagcgggcgtctcgaacaggccgacctgcagctggctggtcagcttcctctgcctcgcaacgccgtcgaccactctctttccttcctactcttctcgctcatctcgccgccattcgacgcttgtggccaggccctgcctgctctttgttcgcccgagcgaatcagccttcgccggcttgtagccgctgtcagctgctgacccaacgtcgcccgactttccttccgccgcctcctcgcaacctttgcctgaccggtcttccagctgtacgtcctccttcttgccccgctttcttctttcaagcctcctcctgggcagtcctgacgccagctcgctcgcccctgccttcttccaggctcaactcgtttcagcggctccagcagcagaacctcgccgcccagtcgctcgcccaggctcaggctctcgctcaggctcagcagcagcagcagggtctctcgcaaggctccggcggtccgcccgtctttgatcctcagcagcaagcccaggctcaggcgctctaccgccagcagcagcagggcatgagtcagagcggcatgcagatgggcaacggccagcagaagggcgcccctggccagcagcaggccctcctccaggttcgttaggcgttcccgctcagtcatgcttcgcggcagctcctgacctcttttctcttctcttctccgtgcagttcctccttcagcagcagcagcagcaacagcagcagcagcaacagcaacagcagcaaggcggccagctgcctcagcagatccagggaggtcacccgatgcagatgcagcctcagcagcagcaacagcagggccagcagcagcagggtacttcgaaccaggtccgtcccttcgtcggcttcgctcgcttgggcaccggtcttttctctacccactgttgctgattggcctccgctccctcaggcccatcagcaagccatgttccagcagcagcagcaccagcaccagcagctccaacaacagcagcagcagcagcagcacgccgggtcgtcatcgcagcagcctcagcagcagcagcagcagcagcagcagcagcagcagcagccgtcggcggccaacatcgccccggccgcccgggcccagatcacgtcgatcctgatgacgatgggcgagcgcgggcagcagatcctcgcggcgatgaaccggaacgagctcacgcaggaccagatgagccagatgaagcagatgatgctcatggccaaccagcgggcgtccaacggcggccgaccacgtacgtcgtccctccccgcctcgtcactcaggtggcctgtcgctgacggagccctgaacgctgttccacagcaattcaacaaccccaagcggccaacttcaacaacgccaaccgaccagggcccggccagcagcagcagcagcctcaggctcaggcccaaggtcagatgcagcagcagcagcaacgcggcatgatggcaaacggccagcaggggtccggtggctcgtcggccaacccgctcgggatggttcccgacgcgcgactgttgcagatgacgtcggagctcgcgatgaagctccgcaacctcgagacgagcatgcagcaggtaagtctccccttccttttcgatccaaacggcgaggactgacctcttccgttattccagggctcgatccggccagacgcactcgaaaaggccaaggtggcccaggctgagtggcgcaagcaggtcaagcagctggccaatgagtgccggatccggggcatcaacctcaacaaccggccggtaccgcctggcgcgaacggcggcaacgcagttggccaggacggcaacgctggcggcagcaacctgccctatagctcgccccagcaagtcccgggccagattcagcagcaacagcagtttcagcagcagcaggtcctctcgcagcagcagaaccctagctcgtcgccgcacctctcgcagacgtcggtctcgggcccatcgccgatgctcgcctcgcaccagccgccgccggtcggcaacccgctgccggcaccacatttgcagcagtacctcgtcggccagcagacgggcgatcactcgcaggtccgccgggcccaattctttcaaaaactcggcgaggtcttcaagagccagggcatgaacctcgacaagctgccccaggtcgagggcaaggacgtcgacctctttctactctaccagggcgtcattgccctcggtggctcggagcaggtccggaaccagaacctctggcccctgatagcggcccagctgacgggcgcacagggcgacaacctcgcacgctcgtcgtccgacgtcgccaaccagcttgcgaccatctttgcgacctacctctcccggctcgaggacgcctggaagctcgcaatcgccaagcagcggcgcggtctccaggagtcgccccagctccagcagctgcagcagcttcaagcccaacaggcccagctccaggcccagcagcagcaacagcagcagttccagacaagcaacggtctcacaggctctggggccggcccgtcgtctggcggtcagccgtcgctcaacgacctaacgccccaggtgctcgagcggctcgccggtctgtcgaccgcccagcggtcggcgatgaacctgccgcccgacgtcaaccggatggtcgaggccctgcgcgccaaccaggcgttcaactctcccggcggcggccagctcaacgtgccgccgcggacaaagtcggccgccggcagtggcatgccgcagaagacgcaggcgctggcgacccagcagtgggcgctacagcagcagcaacagcagcagcagcaggcggcaatgcagcagcagcagcaccagcggagcatgagccaatcatctaacggcggcggcatgggcggtcctgcccagggcggtggcggcggcggcggcggcgtacggtcgatgccaaccggcgcccagattgacgacgcccggcggttcgtcatgatggccgaggcccaggcgatggagaagtactcgatcaccaacaacgccccggtcgaggaccagaccgatcaggaccagcagaccgtcatgaccatgctgcgcgagatgtcgcagctcatggtcgaggccgagaagggccttatcctgttccgggcgatgaacatgtcggaagaggcggcggcgtccatcaagcgggtaacctacttcgtgcgtgccttgccacgcgctttgccttgcgcttcgctgacgcccccgatcctttctttccagctcgcgatgcacaagtgggcgagccgctgcgtccagggccgaggcatcatcgtcgtccggccaaaggacctcgagcagatccgcggcaacacgcaaaagtttattgcctacgtcggcagcatgatgtcgcgcatctcgtcctcgtcgacgacagcggcttcctcgtctgctgccgccgtcaacggctctgccggcggccagctcaacagcggcgctggcgatctctcgagccaggtccagcagtttcagcagcagcagcagcagcagcttcaacagcaggccaacggcggccagctgaccggctcatcgatagcgtcgggcgcgcctgcgcctgcgccggcctcattcgacccgacgtcgttcaacccgccgccgcggcttcgacccgaggaccttcgaccgccaccgcagaagcgggcacgcaacacctcggtcggctcctcgccggccaatgcgggctcgccttcggacgcccgcacgcctcgaacgccggccaacatcggctcacctctcgtcatcgagtcgccggccggcatgacgacgacgcggatggaagactcagaccgcccaagaccacctaatcagcgcaagcgcaagtcgtcgggctcgcagctcgagggtgtgccagaggagcagcttccgacggcctcatctgcttcggcgttcggtcttggcggcttccagggccagcagggctcgacaatgggcggctcctcgctcggtcttcaggtcggcgggggcgaccgggcgaacgagctcgcacgcgcacccgacgacccgctcgctttcctcgaggcccagtggtcaaagctccagtcgatcgattcgacgccggccgcgctcggtcccgtccaggccgatctcgggctcggaggcatgcagctcggctcgcctgcgcccggtccgaagtcagtctttgtctcgacgagcagcttctacaactcgtcaaacggtggcggcgtcacgccggctgccctcaaggccgagccgctcccaccggcggccgaggaggcgtttgatatctcgtggttcatcagcgacgagtgctacgacgacggggccgtcgccaacgcggccgacgagccggccgtcccgagcggcgccagcagcggcggcggcaacaacggcggcagcggcgccaagggcggctcggatggccgggcgatcgaggcccagacgcccgacctcctccactcgaccggcgtcgaagaatcgccggcgtcgacgcgcgaggccctctcgcccaacacggccggctcggcacgcggcgctcagcagcagcagacgccgtcctcgctctcgcgcctgtcgatcccgcagtcgggctcgaccacgtctgccgcaaagacgccggtcctcccgctcgagacgccggttgaccagctgtttgacatgggacccgactcgtacttcaacgagctcggcacgttcgactcggagggcctcggcgagtcgtggatcatctgagttctccccccccctctctctctggccctcctctgcttccctccctccccttttcggtcctctcacgctgcccccttccttctcctcccactgtgccgctccggtgtacgacctcgcttgccccgttccgtcagcatgtacgaaaaaagtcacagctttctcccttcctcctcctcctgtcgctgtacttcttccctcccctcgcgcgcgtgcgctcgcaatctttcctcaaccgttgaaactccccgtggctcgcaagctctaatgaaaccgcccttccgactacacctgtgtcgggagtaaagagctcaagacaagagcgaggggagtgagtggcagcactgcgcccgccgtcgtcgcccgacatgtgatcgtcgcgcgccgccgcgttggggttcgacgcctccccaccgacgtcgaccttcgaatcgccccgccctccctgcttccagctcgctttctcacaaatcagcttgccagccatgccgggagaggagccttacgccgtcacctttctcaagaacctcaagtctgtcctcgctcctcagcggctggccaagtcgaagcgagctcggcgagagagggctgacctttctccgcttccctcccgctcgtcttgcgtctttcgcccaggtatgtcctactcggcgcgctcgccgcctaccagctcgacgtcccaagcaggctggtcgagggcgctttcggcgttggtctcggctcgtgagtctcctctgttgctttgccattcgctcggccgaggagaggcggcatgggacgggagtcgggcaggccatgtcggcgagctaccgtgccgacgggcacgacctcaaggctactagtaggtcgctaggcatcgtgccccgggcacagatcgtccagcattcaggcgagattttggccttcgccctcgatgagagcccatcttttgacgccggcgtcgctcctacctctctcaggcgcgcgatccagctctcggccgtcctctcggccgtgacggtcggcatcatgctctacctcgtcgtctggctcccgcggatcgtcggccaggtgccaaactactcgcgctggatgagcacgagcccgctcaaggccgtcatcccgcttctcgtccatccgctgcctctcgctcccgcagcctggaagcccctttgaccgctgacgccctctgccgcttgcctctcctgctcatcctaagacgtgcgctatgctcggcggctacatcagcctcgtcgtcggcctcctcaacgtcggcccgcagtcgctcggctggctgcgagcgatcggcggaggtccgttcttgcctatgactgacgcctcagaaacgctcgctgactcctgcctgtgtcggctgcttccggcagcgctcggcgtctacgcgagcgtctttggcatgctcggcctgattccgaccccgagaccgacgcgggttccgcggagagattaaagcgatcacctttcgcctctctcggccacccagcgtcttcccccatgccctcatcgaggatcatactgccgcccacctgctctctcctctactcgctctaccctatcatccccatgcctcttcccgtctgaactctggatccgtgttgcatgtctttgcctcctttgcttctgtcaggtcgcgcaggtgccaagctggagacacaagacgtcatatgtgggtcatcagagggagttgagggcgtgtatcgagtggggcagaagggtgtcggactcgggatcgtggaagaggcgtagatgtgtcgtcgctcagtaagctcgtgagatggttgccggagcaaaggtatttgagcgcgggccggctcaagagatcgacgagatgccctccctttcgacccgccggagcgcgccctcttgccgcttgtgcttgagcgataggcccgagagcttgctcgtaatcttttctttggcccaccggctggagcggatggctttgtgggacgagagaccctcgtgctgaagccgcagaggggggtcagtaagctgacgcgcaggccaaacgcgattgagcgaggaggcaaaggcacgcacgtagagctttgggtctcgctcgcggttccggtagtactcgtcgttttcctcagcggcaaagccctcgtcgcccgaggacgagctctcttcgtcatgctcgttccagcgcgggtcgtcgtccgattggaggctatccatcgaggggctacctgcgaccgctccgaccgatgacttgcccggcgagcgatgggccgacgaccggtcccttgcggccgaatccagagagaagtgcgacgagagcgagccggttcggccgtgccggacgccagtcgtcgtcgtcgccttggccgactcgccctcacgtatgacctcagcgacgacctgcttggcctcgtcgacagcagcaaagcgcggatctgatttgacgagtccgcgatgggcctggaaatgagcgtagttcgggctaggtcagctgtcttgtcggaagagccagatggcagccgtcgacgcaccttgccgagacctggtgagatgcggagcgagaggaaggccgtgccgatctgccgatgcatcgcctctggctcgcgctgcgtgacggccagcatggccgcttcattgacgtctgaggtcgagtagactgagcacaccgcagcagacttcaggatcagaatctgcagtccacaaaaagcgaccaaggtgaggcgacgcactcggcacaccgacgtcgagcgtctccccatcaggaatgtcgccgagcttgagcatgccaatcgcccagacgttggtcttcttcttgagaccgcctgaacgcgtctgaagcttgatcaccataaaggttgagagccggtacttgacggccaatacgactgggctggtgacgtcccaggagaaaaccttggacatcgcactgcttcggccggagcggatcgactgcgcgtcgtcggtcaggttgagcgaggtcgaagagtcctcgcacgcgcccgagacggtggccatgtccgactcggtctgcaagacgacgctcgacgcgcggagcgtgctcgtcgcgactgaggacgcgagctcgatcaccttgacctggcgcacctggacagacacaacgtcgtacccagagatgccgcgcggcaggtcgatctcgatcggcttccagagaaaggagagacggatgataccccagccgagtccccctcgcagtggatgccacctgcggccgagcgaaacagaatcagatgtcagtcactgccgacagaacctgccacagctgctgtggatctctcaccgagtcgtcgaggaagcgtcggtaaagatgtcggccagcgtcggaaagtcgacgacgccgaggatgacgtcgcgttcgcggtcgcgctcgtccttgatgacgatggtgacgcgctcggccgtccagtcgcggataaagcgctccgacacggcgttcaggtatggcgacgtctgccgcgcctttgaccgggaccggaagacaagccgatcgttgaggatgacttcgacgtaggctgagacggggatcggcgcctcgccctcggcaagatcagtcatatcggccagggccggaacgccaccggccttgctacgtgcgctccggtcgaagccacctgtcgtcggccggatttgtaggtcttatgatcggtcaggcagagggactacatcagcacaggtcgtccctcgtctgccagggtggattgcggacgaaccctgacactggatgatgttgaactggaagatgccggctttggggcgagcggtgaggtcagcaagagcacaaatcgccgaagggagtccgggacatactgcgatggtctgggcttggcttttgctgaagctcggccagctcgacgccgcgtttgccagcgagccagcggacgttctcctcccgacgctggagccgcttcgactcccactcgaacttgtcaggggtccacttctgcgcgtagtcgccgatgaggccgagccagctgccagccgcagcgtcccgcagcgccggagagggatgaaagagcggcttgagcgagttgtgcttgcgccgctcgatgttggcctgttgcgacgttgcgagctcgacaacgctgtcgccgtcggaagcgtgatgcgagtcaaccgcgtcctgctgcgatggcgacgtcgtgagctgccgtagcgggtagaagcggacgccccaagagagcgtcccgcgaccggtcgtgccgcgcttcgaaccgcggggcgggaggagcggatcctcacgctcgtcgaggtggtgcgcgtcgacagtctcgtccttctgcagctgccggccgcgttcaacgacgtccgcaaggtcgacctcgacactgccaagcgagtcgtccgaggtcactctgtcgctgtcatagactggcggtcgcgagcgagggtcaaaagtcagcagtggacgtgacgcagacgcgtagcagacggccgtaccctggcagacgagcttttcgccgagctcgatcgcgtcggcagggacgaggataaaggccgtctcctcccaaacggggtcaagcgtcttgagcagcgtccgggtcgaaaagagcggcttgtcgagctgcttccaccatgagagggcactgcgggagggcagtgataggaggtcaggacacgggcaaggcaggagcaagaaggcgttcagactgacatgtaagggtcggacattccgttcgagtcagacgagcgcaggccgttggcacgatgcagccggatgctcagcacgccgacatgtttcgaccggatcgccttctcctcgccagagaggagggtctgtgcgaaaaagggcgagcctgagcggtcagtcaccagagcccgggggggggagcctcgatcagcaagcttacgtcgagatccatgctccaagcctcgggcgtgacaaagctctgggtggcagagcgcggtcaggtccgcgcggtcaatcagatcgaggcggatgaagcttgacgaacctgtgcgacccgctggatgcatgacaagacgtagggcgtcaggcccgggatcttcatcgcgttgagcgagcccttgccatgccgcttgaagggtgcggctgagatgtggatctctggcagagttgggaaggtgaaggtgccggtccggacaaaaggcggactcgggtcgagcaggagtcggagactgcatgcgacgaggatgactctcgagttagtccagggtcgaggtcgatgacacgctctgactgaccgcaggatgccggtgatccgctggaggtcgatgaagacgggcgcctcgacaccgcctaggcctcgcaggccaacgccaaagacgacaagcaggccggccttgtcgagcggcaagcacttcgacgtgtcgagctcgaagctgatctcaaagttctgcggcgccggaggtcgacgaggcgcagcaggggtcagcgcgctgatgctctgtccgccaccgctcgaggaggacctaccgcatagtcgcctccctcggcttccccctctgctaggtcccggtcagcgagcttgcccgttcccttgccagcacccccggcatgcaggccctcggcccactcggcgtcggtcagcggccggagccagcggatctcgcacggcgccttgccgagctcgagcgactcgacccgaaccgagtggaccatcggaggacattcgcctgcaggacgaccgtcacaggaggtggtgatgagcgatcgtgtcagaagaggaggcagtcgcatagcggccgcagcagcctggctcgccccactcaagtcgagcggccggcgcgtggccggtgagggacgcccgagccggcgacaagtggacgaaccctgcaaagtgtcctcgagcaggtcgagcactggcacgaagagctcggtgttgatcatcggccagagccgggcgatcgcatggttgacaaaagccggcggatggtagtggccgtcgggtgggccttcgtcgtctccgaccgtgggcggcggcggcgccgtctcccggccgaggccgtcgtcctttgacgagtcgccgacaaaggcagatgcctgccggaagccaggctgcttctgctgctgctgctgctcctgagagccagctgatggatgtgacggctccgagaggtaggcgaccgagacgccgagggcgatggccaggacgaggagcgagccgagccggaagtaggcgaggatggcgaggaccgccgcaaaggtcgccgccggaagcgacggcacgagctctggcgggatcgaagccggcatctggcgagcgtcctgaagctggtgaggctgggcgagggaggtgattgtggtcgggcaggcgaaggtcgagctcgggacgagcagcaccagcctgcggcgcgcgtcacggcggcgcgcagtcagctgaaaggaattagagccggacgccctctgctgttcaaggctgtgctccttctgctcatcggctccgcccgtctggtttggcagaaataggcaagctggtagaaagggcatgtgcagaggaatagagcagtacagggcgccgcagcgcacagagacaaggaggggtgatccacgggagaagggaaagagcgaggagaaggccgcgacagagcaggctccaaagtgggatgaagctcagacggtcgtgttgggctgcgggaggatcttggcctcgcgctcgcggtcggtctggctgaactggtgcgtgtgcgggagcgtggcatgctcgcggtccatcgtgccgtcggtcggccgcgagacgtcctcctcgtggatcgggacctccttctcgtcgtagttcgagtgccggtcggcgtctgcaacggccggggcgaggtcgtcgttcgtcgcagcggcctcgagcatggcgtacttctgctcctcgcgccggtggaggtagccgccgacgaagaagacggcggtcgagaggatggtgcaggcgatggcctagagaaagggaggacctcaggttagtgtcgtggggggtgcgagaacgacagaaaagagatttaacggacggtagaatatcctttggtccaacgaggagcctcgggcgtgcggtaggcgaagagcgggacccaggcgaagaaggcccagctagagaacgagaggaaaaggggtcagcggcgacgttttgcaagaagggagacggccgggacggacccaaaggtgaagacggctccgaggacgacggcgcgctcctcagcactacgccgtgtgagacggttgatccagccgaagaagatcgggttgggcgcctggagggagggtgggcagacggtcagcgacagggcctctgatgggcggcacgagagaagggaagcgcggacttacacccatgaagccgagcatgaagtaggcggcaaacttgaggccgttgggaacggtccagatgcggaggacgacgacggcaaaaaggttgacgccctggatgaaggcaatgatgtaccagatgttgaagaggccggcgagcgagcccgtcaggaaggttgtaacggcgatgatggcctggatcgcggtcgggatcgtgttgatgagctcgatcgagtactgggccgtgccgtcggcgttcttgagcgacttgagccagagagtcatctggccggccgggtaggtctcgatgaggaagaagatgatcatgaccacctgcggaggagggaagggccaagggtcagcggacagaacgcacaggcggtcgcctgacgggacacgcacagggacccagagatgccagcccgagaagatcttgagcatgccgcggacggtgatcttcttggtgccggcgacgccgtcatcgcgcacgcgcttgcgggcgagctcttgctcctcggccgacaaccaccagatgcggtgcttgtcggtgggcagtccagggaaaatgaggaacgagatgagggcgatcgggacggctgcgaggagagaaaggggccagcaaggcagcgtcagcaaaggatcctctcgccgctttcgtcgagcgagagatctcactgatacagccgtcgacgacaaatagccagcgccagccaggcaggccgagcctgccgtcgagcttgtagacagcggccatcaggtagcccgagaacatctggccgagcgagttgcccatcatgaagacggccgagcgcttgaagagctcgtcgcccttgtaccaagagccgaggacgtagttgacgccggtgtaggacgggatagcgagcgcgccgagaatgaagcggatcgcaaagatcgactcgacgttctggagccggacctgggcaaacgtgatgataccccacaggagctcgacgccggggaggagccagcgagcgacgccgggccgcgagatgacgagaacggtcgggatctggagaaccatgtagccgatatagtagtagaagccgaaccctgcaagcgatggacgaggtagacgggtgctcgggtcagcgatggggcgatagggaagcagatcgatatgatggacggctgacaggcgtagtcattgctcttggcgtcgatgttcaggtcctcgcgcatgcccgagacgtaagcgttgttgatctgaggagaaggaaggggcggtcaggtgagggaagcggcagctgggacgagagctaggcagagcgcgacgtacgttggtcgagtcgaggtacttgagaaagaaggcaaaggcgccaaaggtaacgatcgtcatatccatcttgcgcaggagccagatctcctccttcgagtacttcgacttggggtaccagttgaagatgtacttgaagatgccaatcggggtcctgcggagggaaagcgacgtcagccggtcgagcactttcacgcgggcgcagcacagcgcgcgcggcggcagcagcaggcaggcaagacgcacttgggctggtcggtgttgtcgatgccgacgacgaccttcttgggctggccgttggcctcggtggcgacctgggcggcctcgcgcttctcgcgctccatctcgagcgagctcgaacgcgactgggtggcgttcatcgtgtgggcagtcgaggcgaggtgtcgaccgggttggttgctgaatgggccgagggcgagaggagggtgggtgtggagaagaaggacgggagtggctgggccaatgctgacctcttgtagagaggtcgcaaggcccatgtcaggcgccgtcggtgttgcaatcagccgtcggcgtcggcgagccggggttggggtgagtccgagagccggcccatgccggtcgtgagccggacgagccggcggagtgggaggaagccaccaggggcgcagggaagctgcaggcaccagagctcgccagaccgtccgaagacagtgatcagccgatcctgtcagctttgtatcttcgtaggtcagcactctagcagcgacagggacaggaggacatgctggcagcagcctcttgaccggcctcctaaagcgggcgacacttgcaagacgtttggtcgggtctcggcggcgtcgttcgctgggcgctgggctgcacgcgcagccagagggacggagtcagggctcgctggaactgccgatgcaagtcgagactccttcggggcgttgagatgcgccgcgaccctttggcccggacgccgagcgcgcaagacagaatctcggtcgatcttgtggtcgtgcagcaaagctaatgaggaggtggaggtcaaggtgaccctggcgactgagaggcagcgagagaggcgagctccgacaagagcagcagcgacgacggcggcgcgcagcgagatgggcgcgcctcgactgcgaacggggatggcagcgggacgaggcgagatccatgcggcaggcgtaggaagcgacaaaggcgagggcacgcacaagcttgcggaacagagggaggaggcagacgctttagagacggaccgatcaacgggccacgccaaagtggcgtctaggggctggcatcgatagagatcgagcagcgtggccggtcgtgagcgaggacgcgaacgagcctgagccgggcgccggacttcggatgaagcaagggtctggatagaatacaaggcggcccacaagagggccggctcaggatacattacagcagcagcagagcgcaaagcgtgaccagaggaaggaggaagcaagactgagacggaaaagaagtggcacgcagactagacgccgacgcggtgcacgacctttttctaagggagggtggagcagcaacagagaggcgatggtcagcgcaaggtccagcagcaagaccggagagctggacggacctggcccgagaagcgaatgacctcgcgtttctccatgatgaagagcgtccgctcgagcgcgtgctgggtgtagccctggctcgtaacaaactccttgacgagcgagccgtagctcgtcgaccagccgatcggcagccggcgccggacctcgcgctcgatccgctcgacctcctcgttgagctcgccccgagtgaggccctcgaccgagccggccgagacggcgtccatcgtcgagtacttgaacagccggatcgcctcgtcgacgtggtgcggcaagacgacgggcgtgagcgtaatcttggctatcgactcggaaatgcggatgatggcctcgagttgcctggcaaagaggcagggcgtcaggacgggaactgaaggcgaggcggacaaacaacccgacgcaccggacggtgatgggaatcgagctccgctcgtcattgtcgcgttcaacctgctggacctgcttgcggagcgcgacaaagtgcgacgagagcatttcggaagcttcggccgacagccggggtgcacagcgcctgtcgagcgggagcgaacaggaggtgacaatcagcctcgggcgtcgacgaagcacaagcggaaggacgcacgtcttgcagaaggcaacatagcgcttcatcttgtcgacatcgatctcgccaatggcctcgctgcccgttggccggttcatgtggatgttcatgacgtgctttgcaatcgtccggtctcggttctcgttgtggtcgtccttgacgatgaagatcatgtcgaaccgcgaaagaattgttgtctggaagtcgatgttctgagcagggcaaagggcggacgcaggccgcgtggtcagcggagcatgcagccgtggtgaaagcccaaagcgagcgcacctctccgggcgacttcatgtcgtcgtaccgaccccagacggggttggccgcagcaaggacgctcgtccgtgagttgagaattgttgtgataccggccttggcgatcgagatcgtctgctgctccatcgcctcgtggatcgcaacccggtcctcgtcgcgcatcttgtcaaactcgtcgatgcagacgacgcccgagtcggccaggaccattgcaccgccctcgaggaagaactctctctgcaaagagttggcgagcgggggtcagtatcggcgtagatgaagttgtacagggccgacgcaccgtcacggggtcgcgctggacgctcgccgtcaaaccagcagcggacgagcccttgccagaggtgtagaccgagattggcgcgaccttctcgacaaatttgagcagctgcgacttggccgttccagggtcgccgagcaggaggacgttgatgtcacctcggagccgcatgccgtccggcagaatcttcttgctgccgccaaagagcaggcacgcgattgcctttttgatgtcgaggttgccaaagatcgagggcgcgacgctccgcgcaaaccgctcatagaggccctcggaccgcgacatctcgccaaactcctcctcctcctcggcggtgaaggtccggcccgagcccgaagctgagagcgaggtgtcgagctcgaggccgaggatccggaggtagggcatccggagggctggtgccgaggccgacccgcgcgtcttggacggctggtaggtcgagtagatgccagtgacgatgacgcgcgagccagggacgaccttgcccgtcaggtagcgctcggcattgagctgcatgtgtcgcggcagttcgccgacgggcaccatgtcgggcgcttcctggagcttaaccatctgctggtcgacgaatcggcagcggtcgtgcaggatctggtacgggtcgagcgggcaatccttggtcgtccctggaatcgcgtcggcctggcacttgcgcgggagcgagcgcgcgccagagtccatgccgccgccgacgggcatgatgagcgtcgaccggcagcccttgcactgcaggtggagcgaggtcgccttggatgaaagagttgaggccgagatgacgatgccgggcagccgaacgagcttggtcagggtgtcggcctgcgagagaggcgaaggaaggatcgtcagcatcgagcgacaggctccggctcggctaagctcgagaggagactgactgtgagctcgcggaactggatcatgttcatgccgctcctaaggacagcctgcatctcggggacgtcacgctcggccggtgttgcatcctcaccgcgggcctcctgctgaagcggatggagggcttgccttgccgccttgaggagcgccgcctcgagctggcagagggaacagtgagcgagcgtcagcagctgctcaggcccttgcagcttcagaaccacttcatgcaggacgaaccattggcacaaagtcgccgggcttctcctgaatcgactgggcgaggtcctcgttgtaaacgatgaggtcacgcaagtcaatctcgacgacgtgctggcgggcgagcaggctcgagcggatccgatccctgcaagcagacaggatcgtctgcaatcagctccagagcatgcgagaccttctgtgacagctgccatggcggctgctgcggccacagcagagcttggagcgaagcgtcactcaccggtacttgaactcgccgccgacgcggaacgtctggaggaattcgaacaggtgagcctgagccttgctcaggtcgcgctcgcggtcggccccgggcaggaccgaaaccgagtagacgcggttgttgtcgaaaccggacctggtcgggtggggaggggtgaggtggtcagctcggctcggcgcagcggaggggaaggcaggtgcgggtcgtcgacaaggcaaggttgcgaccggtcggtagacgcacatggctcgcttgcgttgcgccgatggtggcctagcttgtggaaggagagcagaagtgttggggcaagaggaagcgagggtaggtcgactgcagggcttgggcgaggcggcgaggacgaggtcggttggctgatgggcaaagccacgacgacgcgtcccggcggcggcgcgcgtccgaatcggcttagacgagcctgctaaatgagccgatacttgaaaaagggatgagacgtccgacacaagcctttgaaccggtcgatcaggccatcttcatttgacggtcggggagcggaggggacgagagaaggcaacaagggctgtaggtgttctagtgcacaagaggagcgggcgccaacaagagagaagggatgtgggacaacggttttttggagatggggtagcagttccggggtaacagtgctcgagaaggagacgactagaaagagtgagagaaatgtccgttgagttgagagggagacagaggtgaaaagaagatgaaggagagtcatcggcagcccaaggaaacgagatgaggtggccgccaaatgcggcgggaaggcgatgcggcggtgcggcgtgacggaagcaggcggcgaacaagttgcgacgagagcgacgaaggagagtgcaaaaggagggagtccgtggcgactagtcgttgggcgagaccctcagatgtaggggctgttgaattgtgacgatgcgcccgaccctggcgggaggatatttgtctgctgctgctgctgctgctgcccggtcatatggagctggacttggctctgggccatcggcgccggcaggaagctcgagcttgcccggatgaggtcgacgctcgtcgccgacgccggtaggatctcggcgctccgatggacggcgtccctcgcgcggttggtcgcgtcgtcgagcgtgctctgggcaaactcggtcgagacaaagcccgtctggccaaactgctcctggcgctgggcgtgtgcctgggcgagaacagtgctcgagagggcgtccgactcggcgacaagcatcgggtccgcgtgcgaatacgagtggccctggccatagtgcttctcctcaacggcctggacgacggcgacttctgccgctgtcaggcgctggtcctgctgttgctgttgctgctgctgctgctgtgactgctgttggagcggcgactgctggagctgctgttgcggcggcgcctgctgctgggtgtagggcggaccgagcgcctggttgacgagcagtggagcagatgcgccggacggggcgttgaaataggtgggcatcatgccggcctgcatcaggctgtcaacgaaaggaggaagcaggtcgtcaatgccaatctgccagggtcccgaggaagcgattgaagcgcacccgtcaccatagcccatcatctggccaccgacgaacgactgcgacatcggcaccgggtagtaggccatgcccggtggcgcgcccataaccagctgctgctgctgctgctgctgctgcgccgttagaagcgggccgccgttcagctgaccgttgctcggcggcgtcgctgccacctgctgctgttgcggctgctgctgctgagccggcggcaagctgtaaatcggggcgacaggcgtcgtgttggccgtcgctgaggtcgaggtcaccatcggctgggcctgctgctgttgcgactgctgctgaggttggggcggtggtagcgccgaagcgggcgagagtggcgagtcggcgccgacgcttcctacgttcaacgagagcacctcgcgaagctgcttctgggcgccgtcctgggcgtagctcgcgacgacctcgagcgagcaaggcaaggcatcggccggcggcgtgcccgcgagcatcgatccgtccggattccagctgagccaggctgggagcgagccggctgggcttgcgaaggttgcctcgatgctggcagacgacgtatgagggtcccacacgcgaggctgccagctccagccgacgccgatgtaggccgtcgccgggaaattggccgagatcttgcgctggaactggcgaaactcccagccgccgccgggcagcttccgagcgtcgacgttccagatgtggttgccctttgacttggccttcttgccgtcctcgttgaagcgcgagatgtagggctggttccagagatagagcttgatcttcttgcccgacatgaggtcctcatggatgccctcgagctggatgcggtcggtaaaagcgttcgtaaaggcctggatccggaatttgaacggacgaaagtcccacgactcgtcgagccgctgcatctttttgggcatcagcgtctggtggatctgctcgccctttgagtcggtcatgttgactgcagggccacggagagcagcgcgtcagccaagagtgaaagagagagagtcgtcaagagacgcactatcggagcagacgcggccgagaaagtcgagaaagatgccgtcgagccggccgttgagctcctcgccgatgccagcctcgccgaagtcggtcccgctcccaaagttggcccagctctcgtccatgtcggccatgctgacgctgacgcggcgcatctggaagcccgagtcgccttcttcgtccgagccctcgtcctcggacgggttaacaccgtcgggtgagatggagtagcgccgcgaggcgagcggatgcggctgctgttgttgctgcaactgctgagcgtgcggtgccggctgtgtgtacggattctgctgcgactggaccggcatcgagtgcggatggtgctgcagatgaggaggctgcggatggaggccgttcgtgccagatggcccggcgacgggtacgagtgccggctcgagctgatacatctgctggatcggctgatgttgctgcggttgtagctgctgatgctgctgctgaagctggaactgctgctgctgatgctgctggagggcctgttgctgctgctgctgctgctgcgcctgctgctgttgttgctgctgaggtggtggcggcaaaggcagcgacggcttctgatctgagctgaccgtcagccggcgtagcggagcgaccggtcgtgacggctgctgctgaagcgagcctgactgcgctggacctggtgggtccggcgtcggcggctgggtcaagggcatggccggttgcgggatcgacagcgacggctgcatgtgcggcagcgacggatacgagtggctgtgcactagctgcggcgggacgtgcagcggctgctgctgttgttggagctgctgctgcggctgcggctgttgaggcagggaggccagggagtagttgacgccgagcgagactggactcggctggagactctggacgccctgcgcctgcagctgctgctggccctgcagcgagtcctcgatccggatgtgcttattcggctgaaggtcctctgcctggttcgccggcgacgagagcggcgcgggccgtttcgacgagtgtgagagcgggacgcccgcgagcgctttcgagatgtcgatcgagaggttgggaatgacgagcggcgagggctcgtgcagcgcctggccggcgttcgacggtgggtagtgaacctggctcatcggcgacgagccgagcgcgccgctgccgcccaccccgctgctattgttgatcgcactcattggcgacgccgcgagtgatgctagtggggcgtcgaggctcgagaggtcgcgctggctcatgggcagcaggctgagcggattgagcagggcggccgaggcctccatcgaggcgatgctcttgagcgtgctgctgatctccgccaggtcgccgtgcgtgatggcccgctcctggccgacgcggatcgcatcgcggatgatggcaccctgctgagctatcgcgttggcggtcgagatgatgctgaagggaatgcggtcgagataagaggggttcgaccgtcagtctcaggttgccaccaaggaccaaagttcgtctgggaacagcgaagtagctggtacgcacccctcgatgtcacggatcttgctctcgaggctcatggcgttgattcgagcactcaggtcgggcgtgaaggttccgcccgtgccgccggcaggggtgaggcccgagcccgctccgccgccgccggacgagctcggctggcggctcggggcgatgctcgacatgggactctcgccggcgaggccgccctggcggagaccgagcccgagatcgaccgtctgctgatggcttggcgtcgtgttggtcgtcggcgggcacgaggctgaaggacctggcggcgggggcggaggtgccggcgggtgatgcgacgagctcggcatgggcgacgctgcgaccgcggcagcactgccgctgcctatgagcggcgagggtccgccaggcgtcgacatgaccgagttgagcccgccgtaaactccagtgccggagccgtcgatgcctcccgagccgccggcagacgaggccgttgtcgtccagaacgggttgaactgggcgtgctgcggctgatggacatgctgctgctgcgggtaaggggccgagggcgacgacgtcggcgtgtgcagaggcgatgtcggaggctggtggtcgagcgacatgctggacccatccagcgagggctgagagtgacggacgagctgtgagaaggaggtgagaggcgatggctgctggttgcagagctccagtaccaggcactcagcccggcgtgggccgcgcgggcgcgggcgcgcgcgggcgcgggaacagctgccaaaacgcccccgaggatggtttttcttagccctcgcccctcggagctcgctctctactgcagccaccagcctgccgagtgcaaacaggcaggtgaggaggccggcgggccctttgcgcgatggcggcgtcgttcccgctgcaggaccccgcatgcccgtcttctcatcccgcgcacacaaacagactcgccaaaggagagtccgtttgagcgaggagcctgtcgcgctggaccggcacggcttcgccgcgcgtacgagtccgccagcctgagccactttcgactctcgagtagcgaccgtcatagatcgcacgcatgcgcacagtttggcaggcgtacaaatcgcagcgcgagacagagcgattcctgctcgaccctatcgacgccgagtgcgttgaacgcaacgacgccgtttgagaaaatacggaaaccgcacgcgagcgctgtgctcggtgtcagacctcattgaggctgcgaggcgcgtcgaggcggagtatcgcacagcggtcgaggccgctcgggcgagggatgatcggcctgttgggcttctttagacggcagcttcgcgcagggtgttcagcgccgaccctgccttgaacctacgaggagcgggaggaatatcggtcagccatgtttcgtcgcagacgcgacgcagcataaagcgggacgcaccactcaagctggcggtcggtgtacgtgtggcgaagcttgacgacaaactcatctccctcgacagggcggacgacgagctcgaccgtccggccgggggcgagcgaccgaagacctcgcagaatcaactgaagcagacgcgggaggggcggcgacgtcaaaaactcctcgccaaactcccaggtcggacaaggacgcaccgagtcggaggaagcgatgcggtcgtagtcgctccgttcggcaaacgtcagaggcagcagcccttgcttcttgaggttctgctcggcgcgacaggtcggtcggtcagtcgcacaccgacttttctcctccttagcgcacaaggacgcaccatctcgtggatccgcgcgagactccgggcaatgacggcaaagccgcccatgtagcgcgggctgagcgcggcgacctcgcgactcgagccctctccatagttgtcggacgcgacgacggcccaacgctcaccggcgtcgcggtacgacctggagatcagtcggcttgtagcgtcagtcgccgttaattggagcgtgctggcagaagggaggactaacgcagcgacgtccggcacggcgccccactcgcccgtcgtctggtggcggatccggttcggccgcccgttatcggcgttgatggcgccgatgagcaggttttgcgaaatgttctcgaggtggcctctcatcgcgtaccaagggccagcagctgagatgtggtcggtcgctgagggtcgaagagggtgagagcgtcagtcgagttgatggaccgtcggcagataggccgagcgctcgacgcactgcactttccctcgaccttgatcagcaagcgcagaggctgctcgtcgtcgccggaccacggtgcgaaaggcgtgatgagctgaacgcgccgactcgtcgggctgacgacgacctcgacggctgacccgttggctggcggcagcgagaggtgctcgagcgtccgtacgtagccctttgacggagcctcgataccagtcggctcggtaaagcggaaggtgcccttgtcggacggaagaggaagatcgtcggtcaaggggttaaaggagaggtcgccggcgaacgccatggcaacgacgagctggtggaaagggcggcgagcagacgtcagtcgatgattatcccacgccgagcacggaggccactgacctcaggcgaggcgacgaaggaatgagtcgccgggttgccatcctgacggccgacaaagttgcggttgaaagaggatatgactggcgggagccggctgtcagctttgcacgagccttacaatacggcaaagctgactcactcgagttcttgtcgcctttcttgacatcgtctcgcgtccattgaccgacactgcgtcaggaagaaggggagcgtcagccgacagcactcaggtgacgtggcgtgggcccgccttgacgcaccaagccccacacgcattggcaagcagcgtcgcgcccgcctcctcagccgtcgcaaacaggtggtcgcgctcagccgtcgcccgaatctcctccgagccaggcgcaacaaatagctttgtcttgagttcgagccctgccgcccgggcctgcttggccagcgcgtcgacgcgcgaaaagtcctcgtagctcgagttggtgcagcttccgatgagggcggccgagagggtcgagggccagccggcagcagacacggacgacttgagctgcgagattgggaccgagaggtctggcgtgtacggaccgttgacgtgcggctcaagctcgttgaggttctgccacccggggttggcggacgagtcagcgctgtgcgcacaagaggtgcagcggcacgagggccaaaacggtggtggacggacaatctcgatgacctggtcgtactcagcgccttcgtctgccttgaggtcgttcaagtaaggttggagcgcatcaacggtcgccgcccgacgcgtagcctgcaagtagcggcccatgctggccgagtagccaaagatcgagcccgtcgcaccgacctcggcgcccatgttgccgatggtcgccatgcctgcgagagcgaacgcgtcagaacgtcagcccgagcgactgagcgaagggggtggacgatgacgtaccggtgcacgagatgctctcgcagcccgggccaaaatactcgatgacgctgccggtgccgcccttgacggtcaggatcgaggcgaccttgaggatgatgtctgcaatagcaagccgtcagcgacaaggcggcatacgggccagaggctcgacacgaacccttgggcgaggtccagccgctcaggcgaccggtcaggtggacgccgatcacgccagggttgcggacctcgtagggcaggccggccatgacctgagatggaccacaccgtcagcaaaagacggcgttagcggaccggacagtcgcgctacttacgtcgacagcctccatccctccgaccccgacgcctaaagctccgaggccggccgcattgggcgtgtgcgagtcgcttccgaccatgagcatgcccggatatgcgtactgctcaaagatgacctggtggaggatgcccgctcctggccgccagtaggtgatgccgtactgcagggacggaagggtcaggttgcggtctctcgcgaccttgcctcgctgggcacacagagggcggaccgacctttgcacacgcgctctcgagaaagtcgtacacctcgcgattggcctcgatcgccgccgcgaggtcggcctttgcgccgttgtgggcctggatcaggtggtcggtgtggaccgaggttggtgtccggacccggctgatgccggcgctgatgaattgaaggagcgccatctgagcgttggcgtctgtcagggcgggcagcagagcgtcagaacttgacgtcagggcctaaatcgtgtgcctggttgacgaaccgtgcagagcgacacgctgcgcacgagttgagaagccgtcagccgagctccaacacgcaaagcggccagacttcaacgcacgacgggccgaagatgcagttgagagacgccgcggacgagctcctgggcgtgtgggtcgtcaaggtggccgtagaggactttctcggtgagcgtgaggggccgcttcagcctggtcggacgagacgcgcagcgagaacgagcggcacgtcagtcagagccgtcgcctgactctaacggcgccggctcgacgtacctgtcgcgagcgagcttgatgttggccgacgtcttggcatatgggatcatgacgccgggctcgattggtgagctaagagcctcggtcgcgaagagccggcgaccggcgggtcggcgggtgcagctgccggcggcggcgaccgttcggtggaggcgcgaggaggcacgggaggtgatgaccatctcgggctggcgctggtcgagtaaagaggagggaggacgagcgagcgagcgcgatgggcgaaaccgagcgatgttactggctcgggccggctttcttcaacgcacttcaacgctcgagagcttgtcgggaccgttgaccggcgatggttcgtcggccgacgaggcgatgcacggtcgacccggtccgaaggcgaggacgaggtcaggccgggtgagacgcctggcgcccttcgcccggtcgcgtccgaatcggatccgacgaagcgaagcaaacgcaggcgagccatcgtgaagagcaagccgagagggcagaggacggtcgagcaaggtcgggctgcaaggagggacaagcggcggagaggcgcggaaggttcagctcgacctccagggctgaggaccaaacacgcaggaatggacgcacttgcctcacgcagcaagtccttccaactctaccgcagagataggccgactttgtccagtctctccctgctggtcgtcgaggaggttggtgagagaggctcggctcggcgacctgtcgtcaggccggccactcttcgcgctcaggccgcgcgcagcaggaacgtcgccagctccgccagctcgcctcgttggccttcctcagccggccaccctcaacaggctcgtcctcctgactcgctctctcgcacctcgctcgctcatcttctcgaagaagccctcttcgctcgccgctcatccgtcgccggtctcccagccatccagctgctctcgtcgccatgctcaacccgcagacgatgtcgcgcccggcccttccgctcaagctctgggtcgacatcctactccagctcgactacttccagtcttgcagggtcggccgactcaaccggtcgttccgcgagatcatgtcgcacccgtacctcgccgcctcagctttcaagggcaccccttcggcggcctctcgggtcaaggagctcctcaagcgcgacgacggcccgactgtccacccgctgctcgacggcgtcggctgattcgcctcccgtccaaggcaacgacggggaagtttcggttgccgtcgctaaaggcaaggagaactcgatgttctcgagaatgtttggaccggccagtctggacctcgtcagtcaaacgccagcgctgctgtcgtgcgacgcgtcgctcgacgagaaggccaccaacccgccccgtaacgcagttgctcgtccaggtcgaagaccgcagctctctgctcacggtcaagatccgcaacgttaagggcgtcttcgtcggccaggtccttgacgccgtccaaggccagatcgcgcgcgaatacttccaggccagcctgtggatgaggggaccagcagccgaacggggtctccgtgagatcgccagagactacctttatcaggtccagcgggaagaggagctgatggtttggcggagcaaggccttcgttgtcaacggccgtatcgagctcgagacgcgcgtcatctccgaatcttgaagcggagtggagctttagcgtaccatccctggagtttcactcagcctcgacgagcgttccgacggtacgtccctcgctgacctcgctgctggtgagtagtcctgacacttcccttttcttttcacagggcgaaggaagtaactacgttactcgaccattgggagctctgcgacccgtgggcgctttggtccatcgcactcaagcacgacatatgaaggaagactgaccaaggccgcggatcgtagggactacgacctccccagtttcagcctttccttgtgatcatttctcgccgtcgacaggtcgacacgctcctcgcttgcgacatctcgattcataggtcaccggtcgcgtcctcgttcggcgtctttccagtacgtcctttgagtaccgacctccatcagcgcagggctgactggctcgtgctcggccgggcaactcgcgttatcagcagcagccttcactactcgtccgtctcggctttggacttccgcctcgccgagcgccatcatcaccgccttttttcacctccctctgccaccgatcgacaacgcctgacagctagcctcatacctctgcggtccttattccattccctctcgtccttgagcaacctgccgctactgtcatgtggcggccgagacgtactcacgccgcccacgcctgcttcagcgctcttcggccccgcgcgagctcgaccgccctcgcttcccgaaccctcactccatcctcctgtccatcctcagcttttctttcttcagctctcggttcgtccgtctccgacgagtcctttacatccgtcgtcagccgcctcgccgcccgcctctcaaaacccagccctcgttctctcgagagctcgtcgccgccgcgcgcaacccccttccgaaccgcacgatgaacgccctttcagtgccgtcggtctacgagcaagagacaaagtcgcacacggtctacgtctctggcctgcctgagaacgtgaccgagcaggccgtcctcgccgtctttgtcgcctttggtgcgtcggccttgcgacccgctgtcgagctcgcgcgtcgagctgccgtcgagctgatctcctcgtcgccctcatgtcgcaggtgacatcgttgagatccagatgccgaaggaggcccgggaagggccgaacggtgggcatggccacaagggacctcgtacgtttgccctgcacggcggcgaccaggtcgacctggagctcacgctcgaccttccaatctcccagcagcaaagaagctgcgaggcttcgcgttcgtcaccttctcatcgtcgttggatgctcaggatgctgtcagtcccggtcgtgctgctgtcgctctcgcatgccttgtcggctgacgttctttgacctgcgcatcccgcttgtgcccgcccagatcgacaactacgacctcaacttcttcccgggccaccccggccgcgtgctcaagtgcaacctcgcccggccgcaaaagggcaaggcggacggcagccgagccaacaacaatcgggcaggtgcggccttgttgccagccgcagattgcttgtgtatgatgccagtcgctgatgcgagcttgtccgacccgcagtctggtcgtctgaggactggctgtcgaaacacggcacggatgcgcccacaaacccggagcaggcggacggtgagatcatcccggaagccgccgaggccgaggaggaggacgagatcgagcagtagggccgacccatgacactctcagacgaacgaccggcgacgttgcccgcgcacccgctgcccgcccactgcgctgttactcatcaccgtcgcggctctcgcgcgtgcaagtagctcgacagtctcaagacagccgcgacgacgatgataggacatgaaagtgcatcggcagtcgggcgatcgtacaagggggcgtgagacagacgtcgtgggatcaaaagatgtggggatgaacgtcggctcaagacgaacagctgcactggatgccgaggctctcggcctcgccaatgtcgcacaggcggcgctcctcgcgctcgtcctccgacagcttgaactcctcctccttgccctcgcggccccaaggctcgaacggccgggtggccatctggaaagtcgcggaaagatcagcggctggaatggaagcaggaagagcggaagaagagaggactgacgtcgagcacgcgggcaagatgccgccgggcgtcgggtgcgccactcgtcagccgggcgatggcctcctcgagcacccattggcggagcgcaaagcgcgggttccaccgctggcgggcctcctggctggcgacggcctccccactcgcagcgagacgagccttgtacttggccagccagccctcaaagtccgcggtcgcgcggacgaggttgcacatggtcgagttatcgagcacgcgctcgatgacgtcgtcggccggcagcttggggaagagcgtgagcgcccggaacgtggaggtgaagtcgagcgtgtgcgtttgcatcagatcgagcaggggctcgacgagcgtcgtcacgtcctcggcggtcgggttctcgaggccgaggcgctgtgaggcaggaaggctgttcgttagtagctgcacgctggacgacagcaggtccggtgcaggctgaccttgcccatcagctcgcggtaggtcgcgtcataagtcgcgaagaattcggtccggagctcgtcctccttggccagcgcggccgcccgccaggccgggccgtcctcgctgacactcgtctcccagccctcgagggcaacgccatgctctgcctcaaagccgacgagctcggcgttggccttgaggagactcgagatggcgtaaaagaccatctcgggctgattggcgtacgagtagcggccctcctcatcgctgtcgagaccagtgggtaaggtcagcggttgacgcgagggttgtcgggaaggcaggcgggcgacgaacgagtgattgcagatgtggttgcgcttgaagatgtccatccaggcgtaaggtccgtagtcaatcgtgaggccgagcaccgagacattgtcgctgcaaggcgtacgagcaagggtcagctcaactgcatgcaagccgagcgagcaagcaaaaggtacccacgtgttgatgacgccgtgcatgaagccctgcggccaagttaaacaggcgtcgatcagccggtgcaggaaacgcttgtcaaagcgagagaatgcacgtaggcctgccaggcggcgaccatcttggcgttgcaccggccaatctcgcggatcatctcccagcagccggccgccgcgtcgagtccgagcttgccgcggacaaactcgccgagcacgcggaggttgtcccactctggccggggccgagcttggtttggtcggaggaggaagaagacgagctggtcctgaggcgggttgagcatctcgaacgagccgatccggaggaacgagggcgcgatgcgcgagacgatcgcccccggctccggcccattctctcggaggacctggagcttcggcagaaggataagcgagagcgagcgcgaggtcggaaacgagccggcagggaaggcggccgagtgctccgaggcaaggaactcgcggaccgacgagcgcaggacagcgagcccatcggcgtggcgcgagaacggcgttcggcctgaacccttcagctggatctcctggatctcgcccgaaggcagggccgtctcgactgagggcgtgacggaagcaaggaggtcagcggcggctctgacgcccgaggtgaagaaagtgaatgtgacgtacagagcgagatcgcccgaccgtcgccgagctgcgacgcccagctgccgaactgccggccgccatagcggagcgaccaaggcttgagtcccgcctcgtcgtcgtcgaggtccatcctaacttcacggccgctgagcaagctgaggattgcgtctcgaccggcgttggccgatgtgagctcgtcgacaccgccggtcgggtagtcggcttgactgacggcgcgcgcatcgccggcgtcgaggtgcgggagaacctcgtcgaggcaagcctgcgagaagccgagcagcgtcgtcggccatgagcgctggccgttcgagtagatggcgccctcctcagctgggctgccgtcgtcatcgctcgccggtcccgcatccttgacggtcggctcgtacgcggcgagccattcttcgacgccgacggccgcctcacgctcgcctttgtcgttgacccggacgggcagccggtaaggaaactcgatcggcagaggcgtgacatgcgcgaaatggcccgaggcaaacgtcgtcgaccgccggagggccgacgggttctgggcgagcgtcgtcgcaaacgacggcgaggccgacgggacgggcgcgagggcggtcgtcagccggctcgcgtagggcgcgagcgggagcgcgtggagcgaatgctgcttcatgtggacgagcgagcgagcgagcatgcaaccctcttgagggtcggtaggagagatgtggtggtggtggaaggagggaggatgaggtgacgaaggcaggcggcggcggcgtcctccgtgtcgagcggagcgtgcatccggccggcccatgcgtcgtcgaccgccacttgcgcacttgaacgacgaggctcgtgaacagcaagaagtccatagtagaagggagaggcgcaacaaatagggcatagcaaaaaagccagtagaagtaggcagtaggcataaacgaccaaaggatgagggatgaagaaaaaggggttgcaagagtgcgaggatgcgagaggacaggtggtagcacaggaagagcaaggaggtgcgagcagtggagcaaaggcagtatggcaggagcaaagaggaagattgaagagggcaagatcgtccgtcgatcgagatctgagggcaaggacaggaagattgtaaagagagggaacacgagcgagcgagaggcggagcagggaggggtgcaggcgagagagaggaaaagagtgaacgaggaaaaaactcctagactggctaccagccaggtgtagcgtgaattgactgaggagagggctcgtcgtggtcgttcaggttgaaaaccgcgatcgcctcggtcgtcgatccaaccgaggcccaaggccggtgggcgccgtgcccgtgcgcacgccgatatgtcggcgcaggcgtttccagctgacccagggcctgcacaggctgctgcggccgaggagcgttcccccacgagctcgactcgtaaggcgattgggccgagggatcgtatggggaccgaggagaccgaggcgccgtctcggacccgggcgtcgaagatgccgtcgggtcctggagccggggcttgatgtcaaagtagccttcgtggccgttgatctggatgacgggcgataccggctgatatatcgccggcggtggacgaaaggcagccgcagcgacgggcgactcggcgcggtacgactggcctgacggcgagcagtagcctgagctggagatcgtcggtatttgcgacgcagagagcgaccggagtgttgccagaggcgacagcggcgccttctgttggagcgggtagtcgtacgggcttggccggacgtgggtgatggcggagagcgacagctggcgcgagacggttggccggaccgggtgcggctccttgtacgacacgccgcgcgtgggccgcggcgagagcgggtagggacttgtccgggcctgagtcgacgagtgctgctgatgaagtggttcggccgccgaaggcgaggcgagggaccagcccgtcgcgccaacaatctcggtgtcatcctgctggacaggagaggcccaaaggttgccggcctctgacggccgctggaaggcgacgggcgacgaggcgtagttgtagattgtccgcgtcgcacaaggatggatcggttcataggccggcggctgctgcgaataggccgcctgagcgggcgtcggcgaccaggccggcatcaagcgctgggccggctcgtgtccaagaatccgctcagcggggacacctgtagggacgttaaaagcgaaacgggacgggaatttgttcgttgtttggctggcgatgctggaccgggatgaggttgatgagctggccggaggacagtacacgggtattggctggtaagccgaggcgtacgtctgcgggacaggcggtccggccgtcgaggggtaattggtagtcaaattgacctcgagaggcgtttgggggctcagcgaccaggtcgaagccggtccgggaaagtagtgcccgttggcggcatagtcgtcagtcgatgaccagccgctgccgctaccgctcgcctcatccgcgccgtcctggtcgacaaggccgtacggcaagagaggaaccacgccgttctttggcgacgtcttgatggagaggttccgcttgccgcgctgcgcaaggtcgggcagagcattagcagacaatatggtctcgtcgccggggaagaacggccacgcaccttgcgcgagtagacgtcaggcttggtgtagtcgacaaaccagaggccgcccttaccgcgctggtggctctggcgaggcatgttctggaatgccggcgtgatcgacaggcaatggcggatgacattctggagacaaaaggggcgtcgcagaggtcagggccgagggaccatctccaaggggacgggggtttgggcgactgaccttccaggagggcgtgatggtgaggtagtaaggataacgcatgacgacatgctcgtagatctgtcggacggaagtaggagtcaggccaacgagtctccgtcgtctgtcaggcgggatcgcacctccttgagcgacagctgctgcgttgccgactggaggagcgagagcagggagcgagagagatcagccaccggaccctttccgtcgtgcaccggctctcggccgcagcgtccaagcaaggacagaccgtctcgatgacctctttgatgagttggacctgacggcgaaaaccggtgataagactgtcagcgcgagacgttgcaagcggtgcaagctgggcgactcacgtaggtcagctttggccgctcgagcggcgcggctatcggagggaagaggggctggcggtcagctccaagagtctagcagcgatgggggcttcgaggcagcgacaagagaaacgtaccgaacggggaggggtatgcgtagacgacgtccatcgaccgtgcgtcacttcaagcgaggcacagggcgaggtatagataagaggggaggcgcgtcgacagggagggagcgaaaggcgtggcgagggggccgaacgaaggcgaagaggggctgcgacgttggcgaggaagggcagccctgctcggagggcgagtgcgggcgcgttgtctgagtgagggaactgctgcagtcgaccgttctgctcgtcacggacgtcgtcgtaggtgctgtggtgaggagaggagaggaggaggtcgcagtatctggacaggttttggcagacccaacgacaggcagaggcttcggtcgggacgggcaaccgggcaggtcgttggttcggccatgcctgcctgcggctccctttgcccatccccgcacaggacaggagcggtcagcggcgccgacgccggcgctttgccccttcgagcaacaaaacggccaaggcggcggcgtcggcgccgctgaccgctcctgtccggacaaggggagcgggcggtgggcgtcagccaggcgagccgaccacctcgtgggctctactttggagcgctttgaagggagacgcacgtgaagcgagaggagtcggagagggattgctgcttgtccggacaagcgcgatgtgtggtcgagaggagggctgagagggacctcggaaggagagagagagaggaggagagggagcaggcgtgggctgaaaggagcgtcgagagcgtcggcgccttttgactggccgagggacgagaagaggaggttgctcgctcgctcgtttcggggaggaaagaggccgggtcgcttgcgtggagggtgctgaccgagagaggagggcgggtcgagaggagcgacggcctgaagggagggcttcgcgggctgaagggtcgaaaggggagggagctgacgggctggaccggtggcgcagacgactggcgacggttgagaccggcgtgtaggcgattgtctagcggcggggcgactcctgtcaacgcgagtagagtaggtcggaaggaggtgacgagaggaggacgagggagatgcttgcgagcagcagcagcagcagcttgtccgtccctatgcaggtgagactcgccccacgcccggcccacgcctcgacgcctcggccgcgatcgcccaggccgtttcaacccctttcctcgcccttgttcgccagcgctacaggtgccgacggtcgaccaagcaaaaggcggggtgaagaggaggccagacccaacagccgcccacctgctgcccatcagcaggagacgccggcggcaagatgaacgagggaggtaggtaggtacgagtgcgaaagggcctgcctgcctgtctacgagcagcgctgtcgttggccgccgacccggcctgcttagggcgaaagcttaatcaaaagctgcaaagcggacgcgctcggccgtcgtcggcgttcgcgggcttcttgctctctaaggtcgtccgtccctcgggcagcgacgtcgtcgcagagacgaaggcaagtcgaaagcgagagcgagaggtcatgcaagagtggacgagtgtgtgcgaaatgaaggacggccggcgacctctttggggctgcacgcgagggttcagcggcgggtgcaaaagcggggagtacaacgaggcctcgcgcacgaagagagcgaggagagtgtctgcgaaaagtcaaagggcgtgcgagtgaatggaaggaggagatagtccagccagggaagagcctcgaaagtgtaaggcttggaatgaagagagggggacagaaaaggtcgaggagcgaaggcggtccagccgcccgccctgtcgacgcccttacgagaagaaggccttccaccagccgacgaagcgctcccagccggtccctgcccacccggcatcgcgctcgcgcccgcccttccagacgcggcccgtccccgcccaggccggcgcgcactcgacgacgcctcggccgagcgtccggccatcgcctcgcgcctccgccgcagttgaaggctgaggggcgccggcgaggccctcctcgagtacagactggcccgggccgaggtatgggaagtgtgcgcccttggacccgcgggcggtgtgcttcgggaagagccggaggaggtcggcgagctctgggttggtgaggtgcgagggagcgagccacgtccgccagcgaggggctgagagcgacccgccgagcgcgtcaaacgctccgtcgtcgtcgtcgtccgacgaagacgagccgtcggtgagcgcaccgccgtccgagtcgtcctcgtcctcgtcctcaacggccgacgacagcaggtggtggtcctctgcgccaggcgtcatgggctccatcatctcggtgacgccgctgacggccgacgaggccgaaaacgtccggtccttgagcgacagcgccggcgcgtagccgtttgcgagccccgtcggctgtggaaagggatgccggaccggtacgggcggggccggcccgcggcggttcgacggtcgaccagctggcgcaggccggccagcgagggcagcactgccgccgttgttgcgcgcgtccgagaacgggtcggagcttgcacgcggcctgagcggatcggccaccccgctcgggtcgtacgaggccgatgcggcagtcggtggaggcggcggcggtgccttaccgcgcttcctgccgctcgctgcaggcgggaggaacggcgcggcctggtcgagcgagccgtggcctgcggcacgaggcggcgacgagtcggaggacgagttgcgcgagaggccggagcgcaagaatggcgcagacgtcgacggcggctccagaggcgagcgcatggcggtcgacgcgggctctgagcggcgacgggtccggggccgcgggacatcctcgaacccgaggacctgcggaagcggccgggcatcgggtcagttttcttgctgcgcagcgggcgagggcagcgcaggcgacgcacgcccttgacgacggcgagcgcgtcaatcatgaaatctttgccgccgcactccatccaaaccgctgcaggaaggccggcaagggttagtcagcgttcgccaagcaatcgcgcaagccgcagactgaccatcgtcaatttcccactcgacgcggctgccgccggcgccgccctttttgaccgcctgcgcctggagcctcaggacggccgcgagcgccgacaggagcggtgccgggccgatattgtttttgccggcgtgcgttttgaggaagagcgcaagccggtggcgtcgctcgcgctttgcgacggcccctcgcggctcgcgccggcccttgatcgtcagcgcgccgccggacgtcgtgctcgcgaggagggcgtcaaactccatccggcgccggagcgaggcgctgtggtgaaattcctgccggacgcggctctgctcgcggatgaaggccgccttgtgcgagggagggatcgaccggaggacgtgctcgacgtagcgctgcgactggccgtcgccgtcgtaaaagacgcgacggcaatgctcggagaagagggcaatgtcgcgcggcgcgggcgaagatgggttctgcggcgctttagagaagatggagaccgagccgggcgtcgttgagcggagcgacggctggacgggtggcggtgacgacgacgacgagtgcagaagcgagggcgagactggagagcgtcgtggctggggctgaacgagcggcggcgtctggctcgctgttcgcatcggtgagagcgacgaagtcgaggcccctggtccgcctgcgctccctccggccgacgaccctcgctcggcatgagacgaaggcggcggtgatctcagccggttgagtccgccggctccggcgcgcgaagcgccgctactggagctccctccgacgctctgcgactgctgatggaagcctggcgggaggtcgtacatcggcttgaagggctggccactgccttggccaccgcttggccttgaaggaagcgacggcgcgtaggacgacgacgaacgggactgagcccgatggtaggccgtcgtcgaggaggacgaggtcggaagcggccggtgcggaggatagaccgaggccgcggccgacgtcgatgccgccatcatgctttgcgcctggcacgccttgtcgagctgggctgtataggtttagagggagaagggacgaggtcgagacgagattcgggatgggagtcgcaagggcgagagctgcgacgcgcgagaccggccgaagggcgaccggcagtcagcgtgctcctccaagctgacgacgacgacgtcaacggacgctctcctgtttgcaacctgggacaggtcggcccgtcaagctagacgcctgctgatcatgctccgcaacagatcccaaaatgcgaggtgccggagaaggcagcaagggagcgacgctcgcccttgcgagcacgcgacgtgcgtcgtctcagctcgcgtcgagcgagatgaggagatgaggagatggcggctgacctcgactgccatagcagtcgacaaagctcaatagcaagtattgtcctctcgcgtaggatctcacctactccgtaagggctcttcatgctggcaatagcctgcgagcggctccctggagcgctgccggcggctcggccggcgacgcgcggtcccgctgctctcggctcgacccaccgcgctcgaccagtgtcgacgagctcagcccgtccgttgagcgctcggttgctgactgctaacgtccatcacagactctcctctccgccatgacctccagcacgtcactgctttccacgctagtcgtcctcgccatcccgagcatgaccgtcgcgttcaccgatgctgccctccgcgcgcaggtgacgtacgcacctctcgctctggacgacaagacccggggcgtcacctcggtcggccttcagccaagcccatgggcgtcgctcagaaaggagtggcaggccagagggctcgcgggcctcttcagaagtaagtctgcgcctcggcaacgacgtctcggacgcgaaggctgacgttaagggctgtgctgtccgatcagatctgcccatcgcttttgccgaggctgcgctgtatgtaatctgggcgcagaccagacaccggctctgcggcaacgtcctcgacccgacggctccggcaaacgcacttgagacgatcctgctcagcgtggtcttcctgcccgtgtcagtcttgcaggcaaacgcggtggtcgcaccggccatcttctccgccaatcctgtaacggccatgcgcaaactcatacagcaagagggcggcctgttgcgcatctacaccaaggaacgctacctccaggccctgcttctggaagcaacgctcaaagctgcttgcttgggcctcatcgagcgcgtcggtctgcgccctttcagactgcccgtgatctggtgcggcctcttcggattgaccatcatcggctggctcgtcggcatggtggccgctgccaccgtccgtggccgcctctgcatcagcgaggccgctatcgccgccgagacagcgactcttgtcccgctcaggcgcgagccctaccgcggcgtcgtcgattgtgtgcggcgcattgtccacgaggaggatctggcggccctcttccgtggcctgaaggaggcgctggtgctgctcggtacgctcactggcgtcgcatctgtcggcggcgtcttgctcttccgttcgggctggctgcaggctcagcttaaagtcaacaagtgaccccatgcccatgctcttgcccaagtcccttctcgacgactaggaacgtatagggggtcatgaggaggagcgggttcgggggtcgtcaagaatacaaagagaaggcagaaggtacacgcttggagtcggtcgtggacaagaggtggaggaacactagagccctggccgacctcaggccgagtcattccgctgctggtcggcgagcatgcggtcgagccgggccgcaactgacgacgggccgggtccggcttcggctgcagggccggatccattggcttcggcccgctgctcggcagcgtcggcgcggatcatgcagtcgagctggcgccgagcgacggcctcctgcgtcgactcagactcggcctcggacgagtcgctgagctcgacgatcttgccctgggtcgggaggccatagaggtgtcggtcggggaagaggagggcggcgaggtcgttcgacttggcgacaaagtcgcccttcttgctcttgccgtcgtcgaccttgccgtcgtccggccgggtcgagaaggtcggcatgctcgtgccggatgccgacttgaggtagatcgacgtacctttagcgactgtgttgcgcgaggcgtgggcaaagagccgatcagcactggcgccggcaagtctgcgaaatctagaaacaccgcaccttgaaggtgaatgatcgactcgtcgatcgtgctctgcgagaagaggcagaagaccttagtcctggaatggtggaagtcgggccattagtcagcgacaaacgagaaggacagcccatcgatcagcggcacgcactcttgattctggcccatccggtcgacgcggccgacagcttggagctcaaagctcggggcgacgcagggctcgaggagccagatatacttggcgcaggtgagggtcaggccctgttgtgcgccagggcgagcagagcaggggtcaggagcggctcgagaaggtcacgctttgcaccagagacggacgtaccgagctctcgcgctcgccgtgcaaaaggaagacgcgcttcgtgtcgtccgccttgaagtcgtgcgcgaccgtccgaatgttggtcgacgaggcggccgagaaggggatgccgttctcctttagcgcgcgctggatgatgtcctgcgaggcgaaagtgattgaggcagacatatcagaaggagagcgtcagcgctggggaatctgctcaacgagcccagcaggggtcggacaaacgaggccgtccggaaaggccgagaagacgatggccttgtagccgcggtcgtggacggcgactgcagggtggaattgggagagtcaggcgctgggtgaaggctatgtgaagaggaccgcgatggaggacgcacggtagaggaggtgtttgacgagaaagtcgatcttcgagccccaggtgccgaggatcgtctcctgggcgatctcgcgccgctcctcaaggtcaaagacgttgagcgcggcgagtcggtcgatctcgcgccggacagccttgcccttgcccttgccgttggccttcttgctcgagtcattcgaggcctggccgtcggcgatccggtcgacgtcgctggccgaaaggatgatgcggttgacttcggcagggttgactgcgggggtcgggcgcctcagttagcggggcaaagccgactccagatggtcagcgatctgcggactgactcttctcccggcaggtcgggcaagatggcccaagcggcgacttgcggatcaggatgtgccagcacccgaggcatagcaggtgggagcagactgcgaagttgcgcaggcaccgtcagcctaggagctcctcgagcgcagttgaagcgagttactgaccaaagaggacgccctttgtgaagccctcgtcaaggcagatggcgcaggtgtgctcgtcggtgacctcgtcgccccggtggacggcgtccatgtgctggaggaaccggccgcgggagacaaggccgccaatcttggccaaggctgcgcacggtgaaggacgagcgggccggcgtcagcaatggcatgtcagtcagtgatggagggttggaaggcgactgaccctccttctgcttgcctgtttcgatggaaggcaggagaaagctggtcagcgcggctctgactgcgacaagagcaaaactgcaaggacgcacggagcgaaacctcgacgcgcttgtcccacgtctttgcgacgtcaagctgaagctctgccaccgagtcagagatggactgcctggagacgcaaataaggagcttcaggtcagttaagtgcagggagggagtgcaatcgagcgagcagatcgcgacgcacaggtccttgaagtacgtgacgcgctgtcgacggagaaggcaaccagcttctcaatgttaggaggcgagcgcggaagaaactgaaagagtagcaaagagcgacggacgagattgtagatgttttcgaggatcttggactcgacagcaagccgctcgaccgccattagctggttcttgaggagggctttgagccgttggccctctcgggtcgcgatctggacctcggtataggagtctgctcgccagggcgtagattgtcagcctcgacctcaaaagagccaaccattcgcgccggacgcactcgagatctgcgacgtcgtgatcatatcgtgcatgtacgacttgaggggaggccggccgacccgtgcgcgcgagacgacgaatgaattaaggacgtatttctatcggcgagcaacaaagacggcggcgagtcagttgcggccgctactggagtagcagaaagaggacaaacggcgcgctcccgcatgagcttttggccgagatcgagatcttccgcgtcgtcggctccgccgactgcgttcagagtttgcaagcgcgaggcgttggccggcccggccttttgcttgccgattggccggagctcgagcacggcgagctggccacgatggccgtcgaggatctcgcgccggtcggcaatcgccgtcaggtaagcctccatgtagtcgtcaatgatgccctgaacgacggctccggcttggtactcgtccatgtcgatcgtggcgtcgatgagttcaatgtcgtcgagcggctcctcgaccttcttcagcagcatgccgagcagcttggtccgccaccggttgataagctcgccgttcttggacagtagcctgaggacctccttggcgccggcgacagcgcgcgccgtctggatgccgtggctaaagtcgggcatcggcacctcgaggtcgtccttcgtaacttgctctggcgtcagcttgcgctcaagccgagcgatgccgccgttggcgatgcgctgcgggcctgtcagtcgtagctgagcggtcagcagagcgaagggagacgaatcgacgagtagcaggcgacgaacgggcgtgcaggaccttacgcagctcggcagcctggttgtaataggcagtctcagtctccaaatcctgggcgacgtgcgaccaatcgctgcaaggtcggcgtgaagctctcgtcagggtcgcgaagcaggcggagggcgagagcaaaagtcggaaggacttacccgagcaggaagagcgcgcggtgacggaggattcggacgtcgcggacgcgattgatcgcagcgatgcggcggctgtgcgtgcggcgctcctcctccgtcagctgctcgtcgccgacgcttgagctgtcgtgcgcgctctctgcgtcggcggcttccgcagcctcaccggccgggacgagatcgacgaggtcgcgcgcagtctcctcaaggacgagcaagaggagctgcacgaggtcgggcgaagtcagcgtcgccatttaaagggagcggacctctcgacggaggagacgcacttcgcgcgcctggagccgccgaaggtcgttccgcgtctcgtccgtgtccgggaccttgccgagctctaattggaccttgaagacgagcagctgagcgtctgaaatcaaagaggcagtcaggccggcggtcatcgagtgattctgcaggtagcacccaactgtcggtgacgcacattcaattttctgctgggtgagggtccggcgggccgtcgcgacatcggaggcgttcgagtcgagcatcttgtcgctgcaggagggtcctcagggcttcatcgtcaggcagtcaaacgtgtgaaggcgggcagacaggtcgaccgtacaggacctcagccatcgacagcaggttctcgccgaggttgagccggcgctcttgtccgacgttacgcgccggccccaggccgccaatttgtggatgagtagagatctctgccgatgaggaaaaggagcgccgggcgggtcagacgaccgacgcgcaaggtgcagcagggcgactcacggcgaaggacctggacccaatagcgcgcgagcccgacgctgaggtcaaagccgttgccatcgacgtcaaagtggagttcgtccagcccgcgcgagaaggtcgagtcgtagtaggcgagctcaatcggagtcagatcaatcgggaggaggacccgcgtctgcggcggaatctgtggatggcgaacgagaaggaggaaatctagtaaggcggcctgcctcaaggatgagactcagcagatggccgcaccgtcagctcgttctttatcttgtccttggtcgtccgcgtcgcgatccgctggaacagcttctcaaagacgctcgcaaagccgggctcgacgaggcgcgaaaagtaggccggcggaaactggcggaggaacctgtagtcgagagccgtcgagcgcaaccggggagaagggtgagcagcggcgctggtggtctacccggaacgtttacgtactggagcgtcgagcggaggtcctcgatcttcgacttggccggcgtgccactcaccgccagggagttcacccgcggcagcagatttaccatgtcctcgatccgcggcttgccggacagctggacctagagggtcgcaatgaaagagccagactcgaagtcagcttaaagaatcgactgtcgtccaggctggaagcgaatgaatccgcacctcgtccatcgcgatgcgccaccactcgcacatgacgagcggcgagcggggcttgagctcgcggttgtagtcgacgccgccccggcgcgggcgctgcttcggctgggtagcgaccgaaaggtcacgctcgagcgtcctgtcgacaagagatacaagtcagcacggcacacgcagtcgtcagacaagtcggccacaaccgacccacgcatagctgcagagcacgacgtcgtagccgccgccgtcggtcaggtagcgccaccagaggctctcgtcaccctcgacgtcttcctccaccccgttcggccggctccgcttgcgtccgccagcgcggcccttgcccttgccttttgacgaggcctgacgtttagagcccgaagcgacgcccgctgctccgtagtcgacatcgtccttttcgtcatcctcgacagcccaccgccggcggcgctcaacctcctgccgatggaactcgcgctcctcgcggatccgctgcggggagggtaatgtcggccaggtttgcgtcaggatctgagcaattgctccgatgcttcggctgacgcacctcgacttcttcagcagtcgatatcttgaacggcagcgacttgtactgcaagcaggcacgagagcgtcagcgactgtaactaggtcgaggcctcgccgctaggacgcgagacgtacgccgttgtaaatgaggacgcgcaggctaggggagtggccctcgagttcgtccttccatctgggcgagcgaagcgtagcgaggtcagctggcggcccgcttgtatgcagcctggtgaggagaagcgggtggcacgcactgcgtctaggagatgtcgcacagcaggtggaggccaaagcaggtcagcagccaagaacgggagggaaagagctggacgccgacgcctgggtagaggacgcacaatgagcgactcgggcgagacgataagcgtcgactgagggcggaagacagaagaccagtcagtagaggcgtttctgcgagagccccgttcgacgagggccgcaccttgacttgcttgcagcgagtagcggtcacctcagcggtgcgtgactcaacgatcttcgtccgagcggcaggcgacgggtggaggagcaagagggccatgacctcgattgtcttaccgaggcctagcgggggcagcacaaagaaggcgctagcgggtaagtatataggacgaatctctcggaagcggaggcgcgacgtacccatttcctcgcacagcatacctcccggttgggcgtcaacgtcccacagccctcccgccgcaactcgccggacgtctgcctcggtccgaaagacctcgcccgagagcctgttgtagtgaaaggtggactcgtcgacaagcatgggctccgggctcgacgctcctgcctcaacatcagcagctgagcttgcgccgtagaaggctggcgggggcagcgggagcgcgaccggctcaaacgcccacatagctccgctgccttcccgagcgccgcgcgcgggccggagagcaaccgccggttggacggcaccgtctgatgctgaactggcggacgaggagctggcacgcggctgcatgtcgacctcggcgtcagagtcgtctccgctcttgacctcgatctcatcggcctcgagcttgactccgtcgtcggtctggatgtccgccggctcgatcgaagcccacgccttgcccttgtcttggacgtccgctggcagattgaggccggcgatacggacgccttcgcgcgcgaggagccagcggaccgtccgtacctggaagggcaggagatcgagctcgagccccggcgggttgaggagcgtcatgagctcggccttagccgcttcgctctcgccgctgttgggcgccggtttgaggacctcgaagaagaacgggatcgtcgtgtggccgccgtgcgtcgcgtacgcggctggctcgactggcgccggcaggatgtccgtcagaatccggcgctgcgcctcggcgacgagcgtcatctcgggcgggttgtatgcggccggcgtcatgtgaagcttgagctcgaggtggaccgcgtgtgaaagagcggacgacgggtccggcgtcgcgtgcaacgcgagcgctgcggtgcagacgaagcgcgggacggcctcgtcgtccgagcgcgagcttgaggaagcgaggtaagcggccgccgccagccacgacttctcgctctggttcgacaggtggggaggaacagggctctggtcaactcagtcgaagacgacgctgcgcacgaggtccctgcgcaccttgtgcttgccgaggaagctggagttgtcagcctgtgccgtgccgagatcttctccgaccttggcaaggtataagagagcctgtttcttgtgcgaggggctcgaccaataccgcggcgtcggccgaggtggcaggacggccgggtggagaaggacgatcgggccgctgtcggggctgaagtcgaggtgcgcgcttccaagcgggaggctctctctcccgacgagagccggatcggcctcgtcgaagatggaccggatacggttgaggtcggcctcggctgcccgacgtcgggcggcggcctcgttcgcgggcggcggcgggatcgtgaagacgaaggtgtgccggaggaggagctgggtgccagccggcggcggcgccggagcgggaccgatggaggcggcctgagcgtcagcctcgcgctcgtcggcgtcgtcgtcgagccggcgggcaatcttgagcggccggcgtctcggcgccgggcctactttggatggtcctaccgaggcaggcggcaaaggcgggacggcgagcttacggaagtcgacctggagcgcgtcggccacgaggcgagcgaggcggtctgtgacgatgccgctcgcccgcccgcggtctgggtcgacgagcgtcagctcgtggcccgagtaggtgtgtggaggtggcatgcctgccttgctgccgctgctgccgcgaaagaagacggaggcgatagaggagggaagggaaggcagcccaaagcttgggtcggccctctcggcgcgcgaggcgtttcagcacgagcaggcccctttcgaagccgttcgcagccggacgacaggtcggcccaactcggcacctcgtcaagccaggtcgatcttgcttgacgagcagaacgcagcgagaggatatcagcgcgccctgtcctaccctcatccgcccttgaggtcggggccatcctggaaggcacctcgcagctgagccgcctggctgcgggagtcggacccagaatctcccaacgctgacgcgaccttcactcggaggtccacgacgcccgctgccctgctgcttattgctcaacccggtctccgaacgcccactctctcgaacccctcacacgtcgacttacaagctttttcgaacatccatgtccctcccttccgctcggccgggccagaatcaggtgcgtccagccctgctgcccgcctcggccggagttcgacctccggtcagcaacggctccgagctgactgtgctcgctcgcttctcgtccaccatcaaacacagactggctgtccgttctctctcgctcttgctctcgctctgctcggttcgcgcatgctgatgtgaacgatcatctccaacagactggggcgtccacgatggcagtatgtcccgccctcattgccggcggcaacggcgcttcggctcccgacgtctgcgactaactgatccttctgccacggccgctgacacgcctcatgatcacagccatcgacttttgcgaaatgaattacgaccatgtctcgtgcgttctatcttgttgaaggtcgacgctcgttgcggcaatgggctgacggtgcctctccctccgaaaacgacgttacgctgcgcgccactgccgctctccgactccgacccggacctccgttacctcgtccttctcgttccccatcccagctggatcgccgaattcgtcaacacgctcagcaatttggtcatcgtgcgtactttgagtcctcttcgcgaaatcgaatggcgcgacgccagagctcatcccctctccgccttcgatccttccctgccctcgattcttccttgcacactcaaacctgccccactctgtcctcatctctgctctctcttctcctccgctttgctccctccttcgctctacagatcctcctctcgatccacggcgtcgtctacgcccgccgggcccggcttccgacccgcgtcttcgtttgctacgccggccagagcctgatcggcatcggctcgaccctcttccacgcgacgctccagcacaagtttcaggtcctcgacgaggtgccgatgatctgggtgacgtcgcttctcagctggtgtgcctttgaggtatgttctcgctgcgattctggctgctctgagctcgcgttaattgactgcgtttatcttgttgcgaactcagacgtctgagggttacgacaacgtgcgctacgtctcgccgctttcagtcggtatcctcgtcttcaacctgctcgtgaccctctcttgcgcacttcagtggtcgccgtcagtccttggccgacgctgccaccctcaaatatccgagcatcaaagctgattgtcgtgaactctacccactgcaggacgctgcacgaaattgccttcggcatgctggtctccctcgccgcttttcgcatcatctacctcctcttctttgcctcggccgatctccgtctccgtcagccccagacgtttagagaggccggccggctgttcgcgtacgggatcggaagcttcctcctaggcttcgcggcctggaacggggacaagtacgcgacttgcgatctgctcagaaacgcgtgctgctgaaggctgacgacgtctcatcttgaccttccagcctgctgtgcgagtcgcacctccagccctggcgtgcacagctcggctacccggccgcctacctcctcgaaggtatatcttggcgagcggtctcaaggcctatcagcacgagctgaccacctgattgaccacctgattgacttctcacgatcgacaggccatgcctggtggcacttcgggactggtgtcgccccctacttctgcatcaccggcgcaaccttcctcatgctcttgctcaaggagcccaacgagacgatcctcttcggccgctcgcccttcggcctgccgatcatcgtccgcaagtcggccgtctcagacaacggcaagctcggcgactcgagctgggcggcgagcgcgagtgggtatgaccgcgcgaagaagctggcgtcgtcggcggccgtcgaggttcgccgccgctcgtccgactcgcccgtgctcgaggcacctgagcggaagagcaccttctgaaacctcgccctctgcagtttccaccccgtcttctgccatctttgatgatccctcgttccgtcaccaccgcgctgggtcagccacatgtagcacgccagttatcgctgccgcgagagccgagatacagacaagtggctaggggctgcctcatcgtatcccatcgggctcagacgcgctgctgctcgcgctcgtacgaccgctcccgccggcggtggacgtctgggctccggctccgggtccgcgtccggcggtcgccgccaaccctccggtcaaacccttcctcctcctttaccgcaaccgccgagcgcgcccgttcgctcccctccctaccggatgcgctcgcacctgcccctgctgccgccgctgcctcctccttagcgagcttctcgcgccagccgcctccgcccgaacccttccagctctcgccatcctcgtccgctcgggccggcgccttgcgcatcgacgccggcacccagccgaccgtctcgttctcctcgtgcttgagcggtttgacagcctgctcgagccgctggccggcccggaggagcgaggccgtccgcgacgagggctttttgacgtgcaggaagttgcacactgcaaacggaaggggcgcgcgcaaagagtcagcagctaccctccagagggcccaaactgcgagaaggacgtacatccaccccgattacagttgccctcgtcgttttgccgacagcatgcctcgcggaagtcgctgacggggctgagctcggcccagagcggcttgccagcgtaccaccggccgttgaggttctcgcaggcctttgcgcactcgagctcgaggtcgaagcgcgcgtagacgttgccgatgaggtggtcgccgacattgtcgcagatgtggagctcgagcaggttgccgaactgggcgagctcgctgaggcggcacgggctgggttagcgtggcgagcgtcggcgggccggaccagaggcaagaagagatgacccacatgtacatgtcggtgtagaaggcgtcaaagtcctcctgaagctcggccggcgagagcgtgcaggcagggtcgttggccgggttctggtagacgttccaggcgacgagcgtctgcgagtggaccggccgctggtgcttgcgcgagcagcggtcgccgtgccggcaggcgccgatctgcgggaaagcaaacagaggaatcagcaacttcgtaagagaactcgtgagaagactggagccggcccaccttgtagtagaacgagcagttgacgctgagcgagcgggagagagcatcgcagcagcgtgtggtcagcaagagagctgctcgccgctgaggcaaaggggcgcgcgaagagacgaggcgcggtcaacggtgtgacgtaccggtcctgctcggtgccgaagatgttggcgagatgcgaggccatggctagagactggagtcgagagagagagagagtaagggtggcgctgaaggttgggaggaggaggaggggaggacgtgcttacttcggcttgcggcgcgggcgggcgggcgcgcgggttgcagttacgccgcggctgtaagacggacgagcctcgtgaacgaagctacggggcgcgtctgctgccgcccgccgcgaggttgagccagagagacgggcaggcgcgacgacccgacagccacccttccactcgcctcaaaccgtcggaccgaaacggagcccgcgagatcgcccatccaagagggcgcaatactgctccaggtcagtctgctccaccggctaaaccttgctcgggttgcactcggctgcagcctcaccaagcctctgagaccaacctgacacctccttccctgcctgccctgcctcagcccgacctcttctcatcggtttccttctcgtctgcagcaccactcaagctcctgtacggctgcatgccatcctcctctccgcgccgccggcggtcaacaagaccctcagcccagccggcagccgcagagacccaccgacgacagccagcagccgacgctcggcccctctcatcatcaccctttgccaggtcggccggcttcctccctctactcctgctcgtattcggcctcgtctcggctccgacggccgtcgttggccagtcgtcgagaagctacccgcaggtcgacctcgccaagctcggctcggtcgcgctagcaggctcgttcgctggcctctcgttctacgacccggcgtcgtcgtcgtcgagcagctcgtctgcaaacacgacgctctcgagctctcgggcgacgctctttagctcgtccggctcggcaggctcgtcggccgcgcctgtcccgctcgctcagacgggcgagggcgactcgatccttgccgtctgccagctgccagcctcggacgggtcgtcatcgaacggcacgctgttcgtcggcggctcgttcagctcgctgggtggcgttgacgctcagaacgtcgctcttgtcgacctcggctcgggcacagtctcgacacttggctcaggcgtcgacggcgccgtcaacgccttgttctgtaacggaacgagcggcgaggtctggcttggcggggccttctcctcgagcagcagcggcgatgggagcggccggggcgtcgccgtctggtcggttgccgaccggtcgttcaccgccacggccttcggcggctttctctcgggcgaagtcgagtcgatcgtcccctcggccgccaacaactcgcttgtctttgccggctcgttcggcacgactggtgccgccggcagtgggctcgcgaacgggaccgcggctgccggctctggctcccttccagtcccacagacaagcgtttactcgcccggctcgacacccttcaccgcctcgctgacgccgctcgtcctcggcccgagcgcgtcaatcagcgcctcgcccgcgtcctcactcgccggcttcagcgacgccaacgtcctcctctgcccgcgcggcggctcagacccctcgtcctggctcgccggcgccggccaaaacgcgctcatcacggtcgacctcggtcaaggcgcggtcgtcgcgaccggactccggatcggaaacacctttatcgccaaccgggggaccacggctttcagcgccgtgtcgatcccaaacaacgaattgctcgagctgtcgtacgtcaacccggcgaccggctcgaatcagacgtgcacgagtccttgcccgctttcgacgaacgcgagcgtgccgtttcaggacttcctgtttgtcggcggctcgcgcgcgctcagcggcttccagatgacgctgctcgaatggacgggcgacggcccgggcctgcacctccttgagctgctctcggccggtcagtctctcagctcactctccaggttcaggtgactcgatggctgacatggcctctccccgactcaggctcgtatgcgcccctgccggtcaaccaggacagttcgactgcctgctcctcgcttcctcagactgggtcgaccgaacttaacggcacgtggtcagagctctcggtgccctcttccctcggcggaatcaattctgccgcgctccgtgcaaccgcccatgtcgcctccttctcggctggggcggtcccctccgcgcgcttctacccatacgtgactggcaccggcaactattcggtcggcctcattgtccccggctgcctcgccgtcgacgactgcgacagccggagctcgctcgacatccagtttgtgccctttcttggctcgggcgtccactggcagacaattgcccctgtccggtacgagcgccgcttcgagctctactctggcgccgtccaggcgacgtcggcggccttctcgcccgtcatcaccgtcagcatgagcacgatgcccgtcggcatcaacggcgatagcttcagcgtcgtcgtcggccgggtcgagcttgagcttcttacggtcgacacgaccggcaccggcgcaggctcgttcccgaacggcgacgcgggcgggactggcggaggctatagcaacggcatcgtttcgggcccgacgcccggcgccaagggtgatgcgaacgctggccggtcgaccggtttcggcttgttcgagtggagcgctgccaatgccccggcgtcggccgctgccagcaccaacgggaccgaggtcggccggctcgcccaggcactcgcgatggcaatcagcgccgggtctgcttcctcgacctcgaccgtcgttggtgcggtcgaggtcggcaaccggtggttcgtcgccggaaccttctcaaccgcctcggctggatcaaacgtcgtcatctcgtccgagacggccggcaacggctcgatcacactctctacgatacccggcaacggccttaacgggccggtccgtgccgtccttgccgtcggcgcctcggtcttccttggcggatccttcacggcgacgagcgatggctcgacggcccttgccggcctcgcccgcttcgacacggctgcgtcgagctggtcagcggttggaggcggcgtcaccggcggcgaggtctcgtcgcttgcgctctcggccgacggcaagacgctcctcgtcggcggctcgttcgaccgggtcctcacatcgttgtcgacggccggccagaccggtagccttgctgcgtatgacctggcgacctcgagctggctgacggccaattcggccgccgtgtttggcgacgtcgcgctcgtcgaggcgactaagagccagaccttcttcgccggccccatcacggccgtcgctggcgaggctgcgtccggtctcgctttgctgtcgtcgggccccggcgggaagccgcagattgagggcctcccgctcgactttgacatccctgcttcgaccgccactgcgtcgggcgccgcaaccaccggcctgagccggcgcgcgtcgccgcacggcagtaaccgcttgtccacagccttgtccaacggcaagcagtggctgcccgcgaccattgcgcctactgtcggcctcgtcaagcgcgcctacaattcctcgcccatcccgatcatccgccgccagcaagcagcctcgccctcgtcaacccctgcgacgctcgccgacggctcagccgaggcgccttcggtccttgcagccggcttctggacaaacagctcggcctcggacgccaaagtcctcgtcctcggcggcaatttcaccgctggccaggcagccaaccttctcgtctttgaccgcgagacgcagcgggctcggcccttgcccggtgcttcgctcgacggagccattcgtgcggtcgaggtcgtcggcgacacggcgttcgttggcggcgactttgaaggcggcttccgggcgtacaacctgaaggctcaggcgtggaagacggacatcccgtcccttgatcgtgcgttttctgcctggcgctagcttcaggcctatgcgtgactcgctgacagcttcccctgttgcgcgccctgctacagctgcgaacggctctgccgccgtctcgacgattctgacgcgtccgtcgacgtcggacgtcattgtcgccggcacttttgcttcggccggtagcgtcgcctgcgcttcagtctgctcgtggtcgacctcggccaacgcgtggtcggcatttggcagcggactcggcggtaccgtcgaaggcattgctttcggcggcggcgacaaggctgacctcctctttgttgccggctcgctgtccgtcaacggccggtcgacgaccgtcgctcgctatgcgtacgacaacagctcgtgggccgctgtcgagggcggcgaggcactccctggcctagcgaccgccattgtcgtcgacgaccatgacgcctcggccgtctttgttgccggtacggcctccgatggcggcgcgacctacctcgcccggtggaacggcgccggctggtcggccgtcagcgaccccgacacgcttaaccttggctcgtcgaccgtcagccagctcgctttcgttccgctctcggcgatgcacgatggaggcgacgagagcatcgtcccctcaaatcgggctttgctcgcaacgggctcgcttgcacttgcaggtgccggcgccgggacgtacagcgccgccctgtttgatggcgcccagtggttcccgtacgtccgggcaacacggcaggacggctcggccggcgccgtccgcggcctcttcaactcggagcgcggctattcgttcgacatccggagcttcctcgcccgcggtatcgtcgtcgtcatttgcatggcgatcgcgctcggcgtcgtctttctcgccgtcctggtcgggctcctgattgcgctctggcggcggaatcggcagacggacgagacgcagtcgccctacgccgcgtatggcaagccggaggactcgccctacggcgccggcggctacagcgaggacgacctcctccaggcgtccgactcgccgcatcgcgcccagatgctcgacaacatcaatgccgcgaccgaaggcgtaatcacgggcgcggcagttggaggcggcggggcggccgcgctcggagccgccggcgctgcaaagagcagccggaactacagccgtggttcgagctcggacgagggctaccctgccgaggaggcggcgggcgtcggtgctgctgctggtgcggcaggcgccgtgtcgagcgacggctcgggcgaggacgtcgaggcccgggtcgcgcacgcccgctggagtctgacgcctgagccaggggccgagcgcgagctgcggatcagggctggccaggtgcgtccccctttcgttacctcagtctgcgcatctgcgatcgctgaccatttgttcctgcctctctccagccctaccttattctcaatgacgccgaccccgagtggtggctcgcgctcgatccgtcaacgggcgagcagggcgcagtcccagcctcgtgcgtgccgcaccttctccttctctccctgacttgagactgacactcttactttccctctttctagctggatgctctaaccccctctcgcgtcgcctctttttttctagacttgtctcgcaccctgtccttctcccttcatgcccctaacgacccccttcctttcccttttgcaccctttctctctctcgcaagcaaaacggccctccctctttcccctgctggttactctcctgacaccctccctccagcctctaggcccaacactctctagcattctccctcccccatgcggtcctctgctcctcttttaatgtcccgtgctgcctaacagagttcttcaggcgcaagtcgtggctacatgcgggagggcgggcctgatgcagatatacggggagaggctacaccggggcatgcagcgagatgcccggctcgcccttcgccctccagcagtcactccctctcctctcccttacccacctcgaacggcctctgcttgctgctgctggcatcctcggcgcgcgatgtcgaacaagattgtcgtctgtatccacgtccccttttgacacgcccggcgccgttcgctcttgctgcttctggagcccaagagctgaccgcttgtctccgccctcgcctctcgccaccacgcctcgtccggcagccgaccgtctaccgcactatcatcgacgacgtcattgcaaacgtccgcgcagactttgacgagttcggcgtcgaggaggacatcttggcgctgctgcagcaggttcgcccttcgccgcctatcctgagcagcagcagcgtccgcgtgctcatcgccttgcctgccctgccctgctccacccggtgaaccctctccgtcacgtcacgcgctcgcactgtgccgacttgtgcgctcttagaactgggagtacaagctattggcgtcgaaggtcgccaactttgaggcgccgccccagccagcagcgtcgacctcgcgtcagccgccgcagccggcgccgccgcccatcccgccgctgcctaaggccgaggccaacccgtcgcaccagcagatgctgccaccaatgggcagcgggccaggcctcaacctgaacctcggcatgccaagcctcgcgctgcctgttcctcggccgggtggtgcccccggcggcgctcagcagagctatggccagcaggtctttggtcagcagcaggcgcagcagcagcagcagcaggcccaggctggccaacagcagtggaacggtgggttgaggggtgggagtgcggacgacaagggcaagggtccggcccggctgcgaggcggcgctggtccggcggatgccgatcactacgcgatcgtcgtgcgtccgcttgctggcattcggctctgactgcctcggtactgggctgacatgaatcctttctcgcctcgctcagtctggctccgagtcgtccgacgacgagtctgactccggcacatcatcgatcggtggctcgccgatggtccccgtcgcgacgcccgcgccgacaccggccgccgccaggccagcgccggccgcccagacgctcccgcgccaggccaacgagtttggcatctttcccggcgacgaagagatcaactctgacctcgacgactcggacgacgagattgacaatgacgaccgaaacgaggacggagaggaggccgacgagaacatcgtcttctgcgtttatgacaaggtgcggtgtgtgaacagggctgcccgctcctgctctcctttgactgctgcttctcagagtgctgagttctcactccattctctctgccaggtcaaccgcgttaagaacaaatggaagatggtcttccgcgacggcatggccaaggtcaacggcaaagactacctttttgccaaggcgacgtgcgacgtcgaatggtgagggcgagccaaccacccgtctcctcctccgcttgagtcctgccacaccttggccgtctggccgtccctcatcctctactgccagctagcgtccgcccgtgcgaccctcccttcttgctcccacctcgttatgccccgctttgcgacacgtcagctgccctgtatcaccccccgcaagtctttgatgccactgcccctgtaatgctttcggcatgcatgcgtgcgctctctctctccctctctctctgtctaccgacgctgcgggcgccgtcgtcgccgccggacgcgacgcgacgtcaacacgcgtgcgcaggctgtgctcccttcaaccccgtcaccatccctccttcgccttctcgttcgcgcaaattcttagtcaacaccttaattcccctctcagacacctggctagaccaatgtcggctctcactgttacgtgcgcgccgcagaccggttaaaggcgacgtcctcgagctgacggacgtcgcttcaccgtcgtcccccgtccgcggcgaccgctccgtgccgccttctccgatgccgaacataccagttttgccccaagctgaactcaatcgccgactgcaaaatcggactcaagtgcagcttcgctcacgaccctgctgacctccgcccagcgtcgaagagcgagctggtcagttcttcttggcttgacgtctcgctctgggacgacgctgaccgcaacccctgctcgcctccagccatgcgctgccgggacgacagcctggatggcggctgccctctctctaagtgcttttactttcacctgctcgacctcaaccaggagaccaagctcgactacggctcctcgcggcgcaggcccctcggcagtagtaataagggcaaactcccgacgctccgctcgaaggtcgctgtccagaccaagggccacttcagcagcaaagaggaaggcaagctctcatcaaatcctaccgctgcgctcaagttcaagaagtagtcggcgccggtctttgagcgccctgtagggctgtcgaccctccctttgacctgacgatcgtccagatccgccgctgcgccagggcgccctcgcctcctttttttcgcaactccatcctaccctcgcactgtcctttctccttcactgctgtcaattctactggaagacgttcgttctgcccggcgtcggatctcgattgcgttcactcgggcactcggttcgaggactgctgcgcgccgcgccgcggctcaacaggccgaacggacgccaactgccagctcgccgctgacctcctgaccgccacttcctccttctcctaaatccgccccttcgctctgctgcagtgatccgcttcaagtacgacgacacagaggagggctactaagaatctgagtgcttctatctcaacctccgcccggcggccgtcaagcttgccgacgatgcaccgaccttagacctcctcccggagcgcctggcgtcggtcgccagcaacgacagcggccgctcgccgccgacatgcgcgactgctatggccgagcgcaatggcccagcgtcctattcgtacggtacgcccgagctctcggtgcttaccatggcggagaacgacgttgcgtaggccagtacgctgtcgtcggtgggccggggcctcccctgtcatcgaactcgtctgtctctcaccgttctcaccttgtcgcttcttcgagccgctgcatctcttgcatgatgctcagtcctctgccaacctttctctgcgcgatccgtcagcgatggaaggcacgcaggcgaaggtctgaagtttggctcatgcagtcgttcggaccacctgcccggggctgctgcgcgctttgagagccgacgagcgagactcatcgctgccaatcagcgagataggctgtcagcggccgcatgacagcggcacgagctttgagcgatacaaaatgaaggatagcatacactgtactggtctcggcgtgagttgctcgccttacaccttagtcgcgacctgatcgaccaccgagactcctctcgaccgactttcaggccgacggtccgccgacagcacaatcggcctcggtcaagacgtgccgtgagaggcagtcgtcgccgttgccacagcgtccgcggaggaagatgttgaggcagctaccaggaccgagccaagggaggacgcccgccgcaaagtcgctcgcgtcaaggatgtgccggttgaggcagctctcgcggttggcgcagttgccggcgagcaggtggttcgggcaggctcccggtccgagagggaggagcgccggcttcgacaaaggggccgacgttggacctttgggtttggccggcgctcggttgtccaacttgagggcaactggtgcaccggcggacggcgcgacatccggtggggtcaagggtaggtcaggcgagccgctcttggaagaagcagtgcttgatgacgcgagcgaggatgcagcagacttcttggcaggcgcgtgtcggatgagcttcatcacgggcgccggcttcggcgacggcttccgagctggcttgatcgaatttgacttcttgccaccgctggtcgataaggcttcagccttggaggccgccggtatgaagttcttgggcgtccgaggtcgagcagcggcatcctcgggcgacgagtggagccagaggcagcccggccgcttgcaaggctcgcccgaggcctcctgcttggggcataaagttactgcaaaccagcaacggcagccaaggtcagcgacgggcagatcggtcccgatgtcagcgataaaattaccctttcggaccgagaccggcgggtcaagctcgtccaggccatgggccatgacgcagttcttcaggtgccagcaggtcgagtgcatccagttgacgcaaagacgttctgcagagcgagcaggcgggcggcaaagatgtcagtcgacgaggctcttgatgggatagtcaagaacgcccacccttgagcttgtactggtagggtttggtcgggtcgttgctcaaggcgaggactgccttcaggatctccgggcttgtccgctgctcctcctcgccgtgcgccatcttgcacgagtcgcccaaggagcaaccaccctcgctgtaatacgtcttgcagagcgaggcttcgagtaaaagagaagggccaagtcagctggtttgcaagtccagaccaggcacgtgaagaaaagacggtgcacttttgtaaaggctgacaaccttgttggcctcgatcaggcgttcccgtagcgtctttgctttcgttgatcctgccgaggcggcctgctgaggagaagcagcggccagctctgttcacaagtagtaaggcagaggtcagattgggcgggtgaaggcttcgatctaaatcgagctcacccttggatgcggaggcagcgaccagagcagcagttgatccgcccgcggttgaggtcttgccggccttggcgatcgtcggccggatcttattgacggcgatggcctcctccggaagaggtacgaccatgtcgtgcgacctgccggcgaaaaaatcaaaacgggtgtcagcgcgaagaaaaacgaccagaaggacggcaagcaagcgagagacttacagtcggcaggcgtcgccgttccagcagtggccagccgagaagtactggcaggggcctgctcgagaaagttcacggcgtcagaccgggcagggccggcaacagcagagcatggcgacgcacgcttcatgtcgtcccaggcgacgctcgggacatcggccgggtcggccggcgcaatgtggagaaacgtgcactctttgccccagccgcaatacccccggtgccagaaggagcggcagggggcgcctgcacgacaagaggagagcagccagtcagcggcgtgaagtaagagaaagggcagccaggacgtactgcggtagttggtcggctgaccgaacggcgccgagctcgccttcgagttgctggccgccgtcagggaaggctgagacgctgtgaaggggtggaagacagtcaggctcgtcctagatgcgccaaagagggccacaaaagactaacctttcctcggctcggatggcgtgcgcttggttgaggccgctgcagccggtgttggtcgaacctcaggtgctttggccgcggccttcgcaaaagaggtcgacgtcttgccgccgttggtcgcgctcggctttgagggcgctttatcgaataagagcggccgaaagacggatcgatcgatcgagggcgtcgtcgactgagcgagcgcaaagccgagacggtcaacgtttggcgtcagagcgagaatgggggcgtcacaaacgcacctcgtccgacttgatgagccctctgatcgcctctcgcatgccaaggatcctttctgcttggaccttcccgtccctcactgccccctccgccgcccgaagcttgtcggcaagccactcgcgctcctcgttccactcgagtaggcaaagcacacgctcgtcgacgtcgctcggcgcctcggccacttctgatcctccagcgacgagcgcctcgacggccgacccggtgcgctcgatcaagcgggtgagggcggcgagcgacgaggcggtgagggcaagggcgtctgcctgggccgtatcgcctgttgcgttgctcgctgggataacaccggccgactcctcgaacgcgtgtagacggtccagcctctggcggggcggcacaaagcaaggtaaaggaagcgtcagcgtccgccttcgttgacagaggtcgtctcatgcggccgacgcacggcctcaaccagcgccagatgctccttgatctcggcacccgcgaccgtcgacgcatcagccttcttgagaagctcccggagcgccttggatcctcgctcgagctcgtttccggcggtctgaaggtcggccaaatgcttgtcatgcccgcgcgtcggcggtggcggaggcttcttgctgctgctgccggttgaggagccgctggtcgagcggtcggtcgatgtcgtcgcggccggagtcgcgcgagccagtgcgccatcgaaggtgctgagcgtgtctcgtgagcgacgtagctccgagtctgcatgaggcgagggagcagacgcgagcagggcagcgacaggtcgggcgagagagaggggtgtcagcagcccactcgacgcgttgctccgcgaccagctaatcctacgcacccttgagcatgttctcgcggcgtgtgaggcccatgagctgcatcttggccgaactggaagatgctggctgacttgaatgaggtgtgggagacgatgggaacggaagaggcagatgggcagaagctgcaagatgaaaggggggggggggcgcgcgcagtcggtttgagccgccgtgcgtacacgagcacgcgaggtgcacttgcgccgaagcgcaaagtcgtggtcttctcgtcagcaagcagtgaaacggtacaggcaatggattctcgacgacagactatattccagctgtctggctggcaagcggggaaacgagggagagaggagcagacagatcagttcatactgccgcaaccgctgttggcggtcgcaagcgtcactcgaagacaagatcaaagcagcaggcacacagctctccgtacaacagctcgagcgatatgcgtacgaccagaccagtgtatcagcgcacctgccggcggacggcaggaccttgtcccgagagcgccagtgaggcggcgcaagggtccgctgcggtagcaaaaaaccctctcctccgcttgagcaagaatcacactctccgacgggcgcgccaagcaagccagctctcaaccgctctttagccggctcggtcgtcgagcaggtggttttcggccttcaggttcaagtcgggccgcgtcatcgtccgcgtctttggttgaaaggccggccggtctcagctgattcatctattgcggtcgcgcggcgagttgagccaacttgcgcgggcgcgcgccggtccgcttgcggatggcctgcctgcctgccgtggcgggcgggccttcttgccccgccggccgcctgctctgctcccccttctccaccgtcccctcgctcctactttctcagccctgcctcgtcactcgcctcaggccggccctgtccgccaccaacggacgatcctctcatgaccgtcacccagcgggcaaagatcgtcccgagggaggaggaccagctcagtgagtctccgccgccgcccgccatcttgccttttcccacgccccgccgcgagcttcgagctcgacgcaggtcccggtcggtggtcgttcccgtcggaagacgcgtcggctcgtgcctcggcctcgtcttgcctcggacaccctcggacactcactactgagccagtagctgacctgcatgctacttgtccaccagacttgacgagcggcatccaatgtacgtcgactcgagggcggcaccgaagctcgtgcctccgcgcccaggacgcggtgcaaagacgcgaccggatcgggcaagctgacctccctgctgctcctctccctcctgtgcctcacctctcctgtctggcgacctgctccagtcaactgcgactggtgtcatcaggacatcgtgcgttccctcagcccggcgacgccggctactctggccagacgctcgcagtctcgcagctcgcgccgcccgtgcctgcctgcctcggcctgagctcgaagccatcctgacgcacctctctttgcccctcgcctcgcagacccactctgtccggatcaaatgcgcggccgaagactgcgccgaggtcgacatgtgcccatcgtgcttctgcaaggggcgcgagggcggcaagcacaaggcctggcacgactacaaggtcgtcgtgcgtcgctctctctttccgtgccggcctaggtcatgcgttccttggcctaaccctctggcctgacccttccaggagcaacactcgtatccaatctttgacgagtcgtggggcgccgacgaggagcttctcctcatcgagggcctcacgctctttggcctcggcaactggcaggacgcggccgagcacgtcggcacgcgcacaaaggacgagtgcgagcgccactaccgcgaggtctggatcggtcagggcggcgaggccgagggctttggcggcgcgatggaggacgaggggctcggctatgtgcgtgccgacctgcgtgcgaggcctgcttgctgctcgccttggctgaccctttgacctttttggccgccttctagcgctccgacatcaggtttgagatcgacaccgacaccttccagcagcgcaagaagcggcggatcgaagagatgcggtccgagatcaaggagatcccctccggctcgaccaagaagccgctcgtctcggccccggtcaaccacgagattggcggcttcatgcccggccggctcgactttgagcacgaggtctacatggacgacgccgaggagaaggtcaaagacatggaattcgggctcgtcatggcctatggcggcgacgagcagcctggggagccgcctgcgccggtgaaggaggagagcgtggccggcagcaccgcagtcactggctctgctgctgctgcaggtatatccgcggccgctccgattgcgcctccactagtaccgtcagatcaggttccgctggccagcggcgccgagccgcagcccggctcggctgtcggaacgcccagcgccgcgtcaccgacaaagatagacgtcgacgacccggacgccgatgccgaaggcgaggacgatgatgacgacgacgacttcccctcgcagccgtcggcgtccaagcttccgccgcccaactcagctgctggcgccgttgctgctgctgctgctcccgtcgccggccagagccatcgcgggctgagctcgggcgcgggcaagaaggcggcgagcagcaaggcgatggctgctggcgggccatcagcggcaagcaagacggcgggcagcaagacgatgcaccctccgtcgagcttgccgaggcacatcctcgccgcccagcagcgcgatcggtccgtctccgaatcggcgacgccggagccagaaggcggcctcgcgtcgaccgagacatcgccgacgtcgtcaacggcgacgatgacgatggacgataagacgctcccgccaggcagcgccagcgacgccaagacgctcccgccaggcagccgctcggccacgccctccctcctgccgccgacgccgtcggccactccggtctctgcgccgaccgtagtgccaccaaagccgcctgcgccggtcccgccgccgccgatgaacctcgtgaccgactcggccgaccacccagaggacccagatgacctcgagctcaagcttgctgtcctccgcatctacaacgagcgactcgaccgccggcgtgaggtcaaaaacatcatcttccagcgcggtttgaccgagcacaagaaggtccgcctgcgcacacggtttctgctgcgatgcttccttcgctgacgagcatccttcacgcgccctctcgcagattcaagcggctgaccgcaagcggccacagaaggagcgcgacctaatccagaagcacaaggtctttgccaagctgcagacggccgaggattacgaggtcctggttgacggcctcatctacgagcagacactccgggcgcggatcgcccagctccagacgtaccgcgccaagggcatctcgacgattcttgacgccgagcggtacgagtcgcagcttgagctgcgcaactcgggcatcgccgacgtcaagattgctcggggcggcggcggggcaggtgggagcgctgcgggtgcagggtccgcagccatcggtgctggcagcaagcggatgagcgtcggtcccgaggacggcggacacctctcggctgccgttcgcaatcagtacaccgctgcgaccggctcgcgtaagcctcgtacgtcccgatccggccaatcgaacgtcagtgcgcctgctgacgcctccttttccctttgcagccgcgccgctcaacctcgcatcggccgcctcgctccacctgctcacgccgagcgagcaggcactctgctcgacgctccggatcctgcccaagccctacctgatgattaaggagacgctcatccgcgagtacgtccggcgcggcggccagctccggcggcgcgaggcccgcggacttatcaaggtcgacgtcaacaagacgtctaagatctgggacctcctctctgagatgggctgcttttcgctcgacggcggcgcgggctcgtcctcgccgggcgagatgccgacgccgacggtcgctgtcggcagccttccggctgagaaggctggcgcgggcgggatggacgtcgacccggcgctggtccccgtcgagcccttctcaggccatgcgacgcccgttctcgattcagccgcactacaaccaacaccttcttcgaccccgcagaccctagcagcggccgcgactccgacattgccgcagcaaacgacgccctcgctcggtggcaagacgctgccgtcgacgccaggcaagacgctgccgccattctcgctgccgctgccacctccgccgccgatggagacgcctccaccgctgccgccgtcgtcggcgcccgagccgatggacggcgtcgtctcagccgataagaacgtctgagctcggttgtcccaaggccgccctcgctctcatctcgccccctccgccctcgacgcattcgccgccacgcccgtcgtatctggtttactctcgtcgaccgccagccgcatgcaggtcgtcttcgaccgacgctattgacacgtcaaacaccccacttttgggcccgccatacacgcgccgatctggctctcgccacctcattggccctagcgtctctctgccagactggactcagccgtcgtcggcgtccttcgccatacgcctcacgccggggcactgcgcccttggaccaagccagtccacgccgtctcgcgaggccgacccccacccgtccacctcaacccccgccttctctgctgctcgctatacccttctcgcccgcaatgatacccatgtgacgattctcccccttgactgctgctctgccgatttgagccttcgaagatgagttgcggatccgaaagcgccgaccgctcgcgagagttgcctcgccgtccctggagactgactctcggccgtcgcagaaccctcacccatcgcgagcgacgcattcctcacctcccaacccttccttccagactgtcaagaccatctggttctgatgcagtcgggcagcttcgtcaacctctcgcgccagaggaaggagcaggcggccgccagggctctccaggagcaacagcaagctgcggctgccgccgccgccgctcagcagcaccagctggagtcttcgaccgacgttgacggtaccccggcatcgctcggccagcagcagcagcatcagtaccagcagtcgccgtaccatgcaccgcagtccacttcgtcgtacctcggggcgaccggctcggcagggtcatcggttgcgtcgtcgccgctcgcctcgcccccgcccggtggcgtcggcggcggaggcatcatgcctcctggcagcttcctcgggagcggcagcctctcgcctggcctggccgaccctccactcgcctcgccgcatgactactcgctgtatccctcgtcggccgcgaacaacggcagcagcggtccaggtagcaacggctcggccggcttctcgctcgtccggcggcatcacaccgttggctcgcgtccgcagaagtacctgagcgcgactcagaaggagcgactcgaggaagaggatgcagctgacgacagatcgcgggcgggaaccgacgactttgacgacggcgcttcgaccggcgcaatcgagggcagctttgatggtcatggcgggcccttcgcaggcgttcactgcctcgggaccggtggcctcgcacgagctggcagcctgccgtcaaagccgagcagtaggtctcaactatgtctctctgcaggtagcatggctgacgacctgccccctcaatgcatcactcgcagcctcctacagtcaatcgtcgggctcgatctcccgcgcgcagggcgtccagcgccgaccgtccctcggcgccaaccggctcgacacgatcccggcatcgggcacgctctacccaggctcgcctccgccaggcttgggccaggacgacgatgccgagtgggagtgggcgctcgcccagagccggatggccggccatcactcggtacgtcatgcgtgcttctcaccgcgcgcagcgtcaccgctgcgctccatgtctacagactcgctgaccccttgcgttttctccaggacctcggccacgactcacgctacacaccgaaccctgccaaccgtctgcagtcgcatcgctcactccagtttccgccagggagctaccatcacgcgacgccggccggctaccccgaatggccgacctcgccgccagccggttcgatgtcgatgcaacaacggtctgattccaacaacagcgactcgcacctctatgcgccggcttcgacggaccctggtgttcgccgcgtccagagcctgaaccaaggcccggtcaactcacgcttagccgaccgtctggccgtcgtcgcgcccggcagcagccgcagcgacgacttccacggtagtctggcgagcaacgccagtctctcgcgccagaactcggcgaaccggatcaaggcaggtgagctgcctccgccgagcagcccgacgaaagccggcccttggacgtcgtccgtcagcccccttcctcacggcgtccggcagggtcgcacgtgggctgcaccgggcgtgctggcctcagaggacgattttggcggcccgcagagtcctgtgccgcaggctgaaggctccaattggcgtgccggtctcggcagcctcgaggccgccttccagggcccgaccgccggcgagcactacgacggtcagcaggcagcgcatcgcggcccagcacccatgacgcaggaggagatgcagagcgctgtaagatcttgagtgctcgagtctctttcgctgccagctgctgaccttgactcgcgactctgcagtttgacgccatgacgctcggccggccggtcggctcattaactgccgtgcatgcgccgacgcctcagggcatgtccggcgcaaatggccagcatgcgcctatgctccacccgccatcgatccgcccgcagtcacggagcagctcgcgcggcccgtctcggaacaacaaccgctccccggccgtcgctccacctcgcttcgcctccccaggctatgggccgccgatcggcaatgctgacctcgctcctcccttcgcggacatgccgctcggaccgccgctgggttcggcgccgaacggagcgtccctttacgaccggtcgctcagcggcccttcagccgccgcagcgaagctctcgctcttgaccgactcgtcggttctcggtgagggtactcagcggccggctggaccggtcagtgcgtcagcctttgtcccgccaattggtcacacgagctctgggccgcagtcattgcagcctggagggcccctttacgctggcgggccgcagccgagggacgcagctgcgtttgacaagccgatgacggcgtccggcacgggctgggagcagaagcatgccctgataggcggcgctttcggcccaccgtatgggcagcagcagcagcccaactttgatctggcgctcgctgcccaggctcaggccatctatgccgcccaggcgggccggccgctgcagataccgcagtacacacagtcgctcggcagcgcaacgggcttcttgcaaagcaccggtctcctccagcctgggtccgcccccgatccggcactcctacaacagcttgccgcgctgcgcaacggcggtggcccaatgcctggaggccctccacccaacttcccctcgcagagcgacgtcaacgcgctcatccaagccaagggctacaacccgatgacctttgagacgagtccggctcaggcgcgcttctttgtgatcaagtcgttcaccgaggacgacgtcgccaagtcgctcaagtttgagatctggtcgagcacgacgtttggcaacaagcggctcgacctcgccttcaaggagtcggccgctgacatggttcgtcatggtgtcgctcgtcctcgtcccctcctttgactgacgatctccctcgctcgctcgcagccgatctacctcttcttctccgtcaactcgtctggccgctttgctggcatggcccaaagtgcgtcctgcgccaacgagtctgcgcgctctctccccgagacttgctgactgcgaccctcgactctctcaaaagtgctgaccgacgtcgactacaacacgacttcgaccgtctgggcccaggacaagtggaagggcgtcttccggctcaagtggatctacatcaaggacattccgagtgcgtcggcccgactctgtgatagctgccacctctgagctcacacgaggacgctccacttgcagacggcgccctccggcacatccgcctgactaacacgcccgagcagaagcccgtcaccaattcgcgcgacacgcaggagctcccgttcgagggcggtgtcgacatgctgaagatcttccacgcctaccaaccacggacgacggtgagcagaaggtccttacagaagggcgtacgagccacgatggctgacgagcatctgtgtcgccctctgcagctcctccaagacttttccttttacgagtcgctcgagcagcaaaagtcgctccagcagcaggcggaggcggcccgccagccgaccgctcacctaccgtacgtccctcccgttcagggccgatcgagcaccgcccgttgacttccctccgcattccaggccgtttcctggtcagcagacgattccgtcgcagcagcggccaccctcgaccggtcagttggatggcggcccacccccgcgcggaggctttggcggcggcggtggctaccagcaggcccagcgcgacggtccacctcgcggcggcggcggcggacgagggtacagcggaccgtcgcctccgcaggctcgctactgagggcggtcttcctcgctcgcgccgtcggttgcgccttgcccgagccatccacacgaaccctcatcgaccgggtccctcttctcccagcccttccgacatagatctccctgctcactctctgcatgcgctccaagctcacccatctcgcctgaacactctcggtcccgatcccactgtatcacctcccgcacgcatcccgacccttcacgcgcacggactcttgcacggcgcctgctaaggacccttcgaaccccccctcgcgcctatacttccgctcatatcagcgcactaccgtctatctatgcccccttccttcatgccagcaatgcccgcctagccttgcgctccctcgaatgcctggcggccactcctgcgggctgacttgagtcgtcgcggcgcgtgctgcacgcgtcgactctccgatccagtcgatcccgttgaagttgccgcgcgccggaaatcgcccgggggggggggggatgaggatccagctggaggactcgccggccttcgaagcctcgcacgcctcagcacccgcccagtttggcacattataagcatggataaagagctgagacctctggctatctcctgatgcaaggacagcgcaaacggtctctgttgatagccacagctggcttccagggggaaacggtcgattcgcgaggctgctggagacgctgcgcgcccgcatccggaccatctcgccactggaggtcgtctgccgctgaacgccagcatgtatgttgatgaaagaggatacaggagaaagcaggtgagaaggcttatgtaccaagttagcttacaatgtcgtcaggcgaatgatttcgtcgcaaaaacagctcgaagcgcggaagggcgtggtctgaggtcgcctgaggtcgatctcggcgtcgccggatcttgggctgctcttctttgtgcttcaatatcgctgtgagtggtatgagcggatagccctgcctatcctctacctcatagtacgagcctgagtctatatatacagttggttgtgaactacgacggctcaaaggcgggcgagaggcctgaaatgtccgccgcgcggcaacttcaactggatcgacagtcgctcttcgcgcgcgcgcgcggagccttgcttttcggcatctcgccgcctcgacgactccctccgacctcactctccctccctgtccctcctccccgcccaacccctttgcagctcagaggacatgcgcgagatcagtcagtcagctcttatagcggtcctggagtcgggctgccagccgggctgggtggagccgacgctgatgcctcgtccccttttgctctgccttgccttccctcctcgacctatccctttcacccttgccgccttgtcttccgccttgtcctcgtctgcctccgatccttgctgctcgcgcatatgcgctgctctcgctcctggccccagtcaatctccaggttcggccgtgtgctctcgtcctgtcgacgacgcgctgcttcgagctgacacccgtccgtctacttcgcttgtcaggtcggccaggccggcaaccagctcggatcgagcttctgggagttcctcctgatggagcacggcctcgaccaagacggccagtacgtcggcgaggacgaccagcagctcgtccgcagctccgtctactttaccgaggccggcaaccagaagtacgttccgaggagcgtacagatcgatcttgagccgggcacgatggacacgatccgcaacggcaagaatggcaagctcttccggcccgacacgtttgtcagcggccagagcggcgccggcaacaactgggccaagggctactatacagagggcgccgagctcgtcgaccagattcttgagacggtccggatacaggcggagcaatgcgagatgcttcagggcttccagacgctccactcgctcggcggcgggaccggctcggggctcggctcgctccttctcggcaagctccgtgaggagtatccggaccggatcagcagctcgtggtcgatcctgccctcgcccaaggtctcggataccgtcgtcgagccctacaacgccctcctctccttccaccagctcgtcgagaactcggacttgacgttcacgatcgacaatgaggcgctgtgcgtagcaactccccgtctgacgatccgttcttggctgaccctctcgcgcctgcccagatacgacatctcggtccggacactcaagacgccgtccccaacgtacgctaacctgaacgagatcagtgagttgccgtctgacgggcttttagctctgcccttcctgacgaccctgccgcttcgctagtcgccaaggtcatggccggcgtcacgacgacgctccgcttccccggccagctcaactctgacctgcgcaagctcgccgtcaacatggtgcccttcccgcgcctgcatttcttcctgactggtgcgtccgacagctctgctctcaagttgtcacgaggctgacccctcttcacaccacgcgacttgcaggatacgcgcccttgacagcaccgggatctgtcgcgtaccagacgtcgtcggtcgccgacctgacggcccagatgtttgagccgcgcaacatgatggcggcgaccaacccgaacctcggcaagtggctcgccgtcgccgccatttatcgcggcagaaagggcaagggcggcatcggcatgcgggacgtcgaggaggcctcgtaccagctccgggccaagaacgaggccggctttgtcgagtggatccccaactcggtcatgacgtctgtctgcgacgtcccgccggttggtgccgaccgcggcggggccgccaacgccggcacgtttgtcggcaactcgacctcgatccagacgctcttccagcggtcgcacgcccagtttgcggcaatgtaccggcgcaaggccttcctccactggtatctcggcgagggcatggacgagatggagttcagcgaggcagagtccaacatgctcgacctcgtctccgagtaccagtgcgtgctcgcggagctggtcttacttaaccggccgtgtacgcctgctgactcactttttgcgttcataggcagtacgagagcgcgacggccgacgacgaggagtactaccaggaggacgtcgagggcggcgagcagcagtacgaggaggaccagtagtagctcccaggtgcgcggcctttgtctcttcctgctcaattgatgggccgtagctgactaggatcgaccgctcagacccgcctgcacatctcttctcgccctcccatgcttcgctcgctccgctcgccctcgcccggccggcgcccgccaccttcttgtacgacgaccattccgatttccccgccctcacctctcacccaccccggctctgcatctccggccgcgctctcctgcctagatggctgccgtagagaaatgacgaacgatacccccttttgattgcggccgtccctccacgacttgcgtagagcagcgggtgcggactgacaccgacaagcccgccgtcgctggcggatcgacttgccaaagcccttgtctaagcgtcgaagggtgcttcagcgaccggtcctcggcttcctgtagaagctctgttgcctctcgaactcgtttgaaagttgcgtcggcgggcgacgacgactccgcccgtgtcgtactgcgcatcctttcaccgccttcggcacgtcgctcgctcgacctcaaccatcatcatactcccgcgacacataccaagcaagagcaagctcgcacagatatgggtcgacaggaggggagcggataaagggtgtagggcggccgggtgagagggagggcgggcggccgtgcgagagcggcagacgacggcgggggaggcgctggcgactggccaagagtcagcaatgtttgcaagggatggcgacagcgctcgccgccaaagagatgtcgactcgaaagggcgcgacaaggtccgatagctggtcaaagtcgacagagtgattccagacgtcgttacgcgccgctcgataggcggccaagatgagaatggctcacactgggtcgtgggaaaggtgcatgagcggcgcattgatgacgctcaggatgctgatggcgcgtagaggtcagtcctgtttctgcgtcgacaggtggtgatggtgcagccgctggcgatgcttgtggacggtgacgtatctcaggagctggtcccacggtaggcaggccgagtgtgcatgttgccgtcgagaaaaggcagaggggatcagcaagccgactcccagcgagcaaagaaaacagagcgcgcgacggaccaagtgaggttgtccgctgaggccgggccgaacgcagtccatgcagttgaggacgttcgttgagaaagttcttctggtccaactcggcctaggtcggcgagagctgcccgactcgcacctggaggcgctccagggttgagcggcggacagagatcttgggctcggtcactgcgggctccttcaccgcccaggcgatcgttctggcgagaacgaaggggtcggtctcggtctcggccattttgacgacggccggcagttgggctcggtcgggccacccatcgagaataacagagcggagatttcaatgatggacaccgctcgtttgggatgttttagaggggcccgggaatccagagcagcttggcggcagtcggtttcgttcgattgtggtctgccacggtcgcgcgcgcacaaaatcagcagaggccctggaaggtctgagcgaacaggggtcaactgacgggtcagcacattccacgtcagcaggtcgcccgggctcgaactgctcgacactccgacggaggtcgccattgtttgggtagttcttcatttggatgaccttcttgtaaggtgcctcgcttagagtgacggctggcttagcttgctcagctggcttaactggcttgactggcttagctcgctcaacagcctcgaaatgaagctgtttgctgacctcctcaagcttctcgacagccagctgagactgcgaggagaagttgagttagcagacgagccctcccttcagagctgaggaaagagcgcaatagctgaaaggcattgccagcctcgggtcgcagcgcaggatggcagtcttcgatgtcgccgatatcttcctcttgtcgcgcgccctatggagcgattcgatggcggcctcgaccgtgcgagaagtgtcgtgcacctcggccgcatccgtcagtgatggggtggccaggaggcgcgcacaattgaccaggatgatcgggtcactagggtaggccgccacagcaatgttggccagtgagacggcgaccttggaattggtaatcgtgcgctggctgacgaggcgacgaaacgagttgtgccctggtcgtcgctctgagccgatgactttgaagggcgagcctggcatgagcaggaggttgagcgccagcggccaatcgacacttgaaacaagttacaagtcagccaaggggagcgaggggcaagagagcagatggcagggacgtaagagtcagtctgtgccacgtgatgaacgtctcctctgctcaactggcacacagcttgtcaaatagctcggtcgagggaaattccgcccgctccagaggcgccaaatgggccgtcaagctcgaatttgtgatacatcgcgtcgcctcccgtcgcgtcagccggtgcaagctcgcgacggcgtgcagcttcacgcaatgacgcgcctgcagagggcttatcctaaggtccacgcgagcctcctggcagacgttcagctggagctggaggaaaaagagaccaacactggagtcagtctcctcctcttttgagcgaaagacggaacgcaagcatgctcgcgaagcgcgaaagagcgagcccatgtcgagccttcagctctggtgcgccgtccaacgcgctctcctcgcgacccgctccctgccggtcgaccacagcttcaagcgtccactggaatctttcagcctcaacggacgtacatgactggccttcagacgctggcttggagtgcgaagatcggcctgactcttgttggcgcgctggtatcggcgagagttgccgctgccttggcctcctcgcgtaggcgaccgcacgcctggcggcggcagcctcggcgggctcgctgccagcgctctttggctggacactgagattctgagcgcagatcgctcagctgtagtcggacagaactttgaaagggccgaggacagacgcgagagctgggcgcgagggccgaaggtcaagctcgctcgggcgaggggaggcggcttggctgttgctcaagcgccaagagcccaaagcatgaccgcaggtcgtcgcttttgatgtggtaaaaggagggtagctggagaacgccgctcgtggaggagtcgtgggcaaggaggttcgtggatggtcggtcggagaagcttggacgggaggaaggacgaccgacagggcgaagcaggcagccagccgcgcgcgcgggcccagcagccccgcgacctgccctcgaaacccgatcccttggctagccggccaccatctgtttgtatcgcccccagacatgttttggcaacctctccttaattgtgagaaccccagcggtaccggtctcgcagcgattcaataagatctcgtagtgaatgtttccgcccgcgcaaggggggctcccgcctccgatccccctccggcccttttccagccgtccctgtactcgaatcgccggcagactagttttccgcatctctcctggtcctggctgaccagcctgacaaagtcccgcgttgatcgcataagattcagtataagattcagtaaaattgcatgtaccccttacctggggggcatctagcgctgccagcgctcgggcggcggctggtcgcggtagtcgcgcgctcggtcgtagatgtcgatcggcgcccgatcccagttcgggccagcgagaggcggcggcggtggcggccggcgctgcccgtagtcgggccgaccatgtggcggcggcggcaacgttggaggcggcggcggcgggtagccgtagggcgtatcgtaagctgcggcgccgtattccgagtagtgtgtcggtggcggcggcggcggcggcggaggatgccctggccaggtcggcggagggggcggaggatagtgatgcgcgggcgacggaggccgggcgttgtcgccatgtcctggctgtgcccctggtcggtgagaaggcagaggctgagcaaggactggcacatacgggaagtgccggtcatcgacctgcatcggcggcggcggcggtcggtataggtggccgttgtttcgcggcggcgaaggcgggcggttccaggcacaggccggcgccatgcgaccttgactgactggaggtgacgcctgacttgcaagcggaggtgggagagcctggcggccgagccgcggagaagccggtcgaggcggagggtaggggaagctcgggctgccaagagggcgactcaagtcagccttgcgactgacagaagaagtcggcagacgtactattggggctcgcgggcgaccgagcggtcgtagattggccgtgcccacacttttgggtcagactcaaggctgagccgtcggacgagcggcacgtggtcggccggtcgcgagtcgcggcccgccgtcgacgacaccgtcgacgcgctcgggcccgacttgtcatttttggcctggaggtaacgcttcgcctcctcttcgcgctcctttctcgcccgctcggccgcctgctgccggcgcgaggccgtttcgctcatctggcgctcctggcggagaccctggcgctcctgctcgggcgatttcgttttgccgctccggctggccttcagccgaggctcgccatgcgtcgcggtcgcgtgacccgaggccgcgtcgacacgtgtcggcaccgcggatgtggtcatctgcggtcgctctggcagtgaggcgtaagccgtcagcgaggcaggcctcgccaaggaggtcggcgcgctcgacttcgtctcgttcgcaagcggaggcagattggtgatcctccgaatgaggggcagcgagcctaccgactcggtgacgggtttggtgacgtcgatgggcggctctagtcgcgccaggagggatgaagcctgcggtttggctttggcagcctcgcccgtcagccgaccctctccgctcacggtcgagcccgatgatgagttcgggtccagctcaaaggcccgggcaaagggaatgaggctcgagatgcgactgagcagattcggcaggttggcgaccgtgagcggcgacgtcgggattgatggcccgtcagccggcaggggcgcaggcagggccggcgacggcaacgaggcggtcaaggggtctgccgttgagaggtcgatgcagttgagcagcgaatcgtttgtcgacggcacaaggttcgcaaaggatatgcgctcttcgggcgggcgctcagccgctcgtagcggcgaaggagtctggtcagcaggaagagcgggcctctcgctcgtcggttccggctcagtcgtgaccggcggagaagacggatcgtcggacaagaggtcgatcagggcgtcgacctcgtcggcctcggggtcgaacggctcgaagctgtttgcaacgctaggctggtgtcgatggtcgaaggacgtcgagggggcgggaccgggcgcggccaatacgtcggcacctctcagctgctgggcgggtggtgccggctcggtcggcgtctgagtctggtgcgggacaggctggccagccggagcaggcgaagccctcggcaggtcgccgagccggagacgcttaatgctgtcctcgcccctcggctcccatgatggctcgcgcttcgtttcgggcccggtcttgatcggagcggagggcgcgactgaaggtagagcgggcggagaaacctgccgggacgccgactgctgggtggcgactgaggagccgtagaaggacagtcagccgacaagacgtctcgatgtctgaccataaaacgcacgaggagcagcttgcgaccagtttgacagctttatcggctccggtaccagcgccggcttttgcgcggccagggacggcgatgaagccgacgacagcggcggcgtgctctttgccatgtcggcgaggctgatccgatcgctgcttcctcgggctgacttagggtcccaagacgcgggactggctcgacgagcgggcagcgtggtggccggggcgatagctggcggaggagcgggtgcctggtagagtggagcgttgcgcgccactaggcagagagggggggggggggggcaggggcgatggcgggcataactggattagagcgagagcaggctcttgaggttctgtaggtagggcaaggggcaatcggccggtcaggtcctgcacaggacgagggccaggatagcaacaagagatggaccttggcgagctcaaacgttgtcgacgcgatcaggttgcgaacgtctttgcccatgtcctcgccttcgctcagctcgctcaaaagctcgcagttgccggcaagggctcggagcagccgtcggccctcgcccacggcacggagcgggagcgagtccttggagacgccgacgatcgacgagccgatgacaatgactgaagagaggttctcgcggagctcggttgcaggcgagcccgagcggaccgaggcgagcagcgtctggatggccgagatgagcgactcggactgcgtgtcgaggtacggctgcggtgggggagatcaatggtcagcgagctagcgagtggtgcgagacggcgagagcgagcggcgcacccgaagctgcatccacgcctgctcgccatcggcgtctccgtcatcgtcgtcgtcctggtcttcgtcgccatggtcgaagggcgagcggaagccgtttgccggtcgagagtcccacaccggcttttgcgcactgccgccgccgctgccgccccagcccttctggcttccgagggacgacgcatcggtctctgccagcgaggccttccgctcgaggttgaatgcgctgctggtgctgccgatcgacgaagtcgacgtcaggcggtagttctggccgtcggcctggtcactgccatcaccaggcgagggcggggccgacaccgaaggcttcgccgtcagcgttgagtcgcgcacgtcatagttgctgccctcggacgactggcggctgcaggccggcctgatcgcaagcatagtcgagctgtcctcctcactgccgccttcgctggctgcctcttgcatcgcagcgagctcggatcgatagtcgacgtccttcttctcccgccggatgccgagcagcttgaagaggccgacgaccgaggcagcgacctcgctcgccgccgcatccagcaggctgatgggcgagaggccgtacgacatggcaaactctttggcggcctgggttagcgcgttgagcgtcgtcgtgctccgctccttgagctcggccagctcggcggcgtcgacgtcggcccgaagcgctgccggccggctctcaaacatctcaacgtcgcgcgagatgtcggccatggcgtggatgacaggcttcatcgccccgagcgtcgaggtcggcgccgtcgaccgcgcggcggtgatgaggccgtcgatcgccgtctggaaggccgtcacgtacgtgtcggcgagcgcgccattcttggtcgccggcaggtggtcgttcgtccgcggcgccgtcacgaacatttgcgacgtcgctacgagtcaggatgagccgtcagtccctgatctgaaagggctgcggacgaacgagagaacgcacccttgaggttccgtagctccgtcttggccgccttccatttcttctccatctctcgtgcccgggcctcggctgcagcaacggcatcgcgctggcggtccgcctcggtgtgaagctggtcgttctgaatgctgagcgagttgagctcctgcacgaggtccttgacctgcaaacgaaggtcgtcatcgaccgcgttgggggctttcgcgaaagacgatgcctttgctgccgaagcctggagggcggcggcccggtccctctcgcgcgtgtaagctgcccgggtctcgtcgagctccttgcggatctgattgacagtgccgctgaacgtctcgagttgctgagagaagagaagggacggaagagaagggacggtcagctgcctgtcgatcgctcgaaggacggtggccgcaactgaccttcttggcggccttgacttcgccctcggcccgctcgcggacgtcacgctcctgctggacctctctcgtccgccgctcgagcgaatcctcgagcgagccgagccggcccgtcaacgaggccaccttgtactcgtactctttgcacagctcatcagccgcgcggtcgccgtcgcgcaagtcgcggtcggcgttgctgctgccgttggcgatgccgagcgcgttggccataccaaggcctctcgccctggacgcagccgacgagaacgatgtgcggtcataggaggcgtcgcctgcgccgtcattgaagctaggcgagggcgggccgccgccgtccgaggtgatgtactccgagtcgcgcgagaagggcacctggatcgactcgagcgccatcgtcgacttggtcgggatgacggtcgccgtcgtcacgctctgcttcgggtgctgttgctgtgagcggttgtggtcatgcgacgacgttgagcctggagaggccggcgaaggcgtgacgaccgtcggccggctatacgacgcctgccgagcatgcgacggaaacgcagccgaagacgggggcgtcggattgtcgttcacaacttgcaaggggggtcctcgcagcgaggtgaccgacgagatcgacccgttggccagatggcggctcgtcgagttgtgatttgacgcggcgtggctagccgacgtcgagactgagcctgaccggtcacgctgctgctgagtctgcggaggcgcagagggtggcgtgggaggaaagtaggggttcatctgcggctgcactcggaactgctgctggtcggacgagaccgaggccgaccgcgaccggctgttggccgccgagcccgagcctgcctgcgatggcggccgggcgccagtgtttgcggtggggtagtgcgactcgttctcatcgagctcctacacaaggtgcgaggtcagtagcggcaacgaggacgccgaaaaaagagagcccgacgcacctcttgctggtcggccggctcctgctgcggtcggaagcttgggttccgtcggagcagttcatagtagacgtcgctcgcgaggtccttgaagcggttcttggtcaggctggcgagcttctgccgggccgcgttgcgcttcgggtgaaactcctgcttgaccggcaagtagggcactggagacgacagcgggcggtgtggtcagccgtcaagtgccgcgaggccagctgaagaaggcgccgacgcgcgcaccagatgcctggtcatcggtccgccgacggacgagttcgtcgtacacgtcggtcgagagctcgtggaactgctgcttcgacagacgggtgagcttctcgcgggcgttgatgcgcgcgttcggaggctctgcgtcgagcagaaggaggcaggcaggcaagtcagcctcaacgtcttcgactgcattcaaaggtggcctggagacccccaacgatccctgcgcgatgatgccaggtctcatctcgagctgcatgagagcaggccgacagaggagccggagtaaggctctggcgactgcggcgagcagccgccgactccccttgtgtcggcctatgacgcgagctgggggggcggacgtgcctcgtttaagaaagtcgacgagaaagtctccgagctcagcccagtaaacacgagcaatctctctgcgctcgtcgtcgcccatagccgagccgagtgcaggcttgatgccgctcgcgccgccgccgacactgggggaggttgcggacgaggtggacggcaggcggtccctgccggcaacgctggcaccacccgacgagggcgcataggacgagtactgggccgaggaggacggcgtcggcgagctcgcgtaggattggccctgctgatactgctggcttgggctcgcgccgccgtgagacgagccggacgacggcacgcggtcctgctggtacgggtactgctgctgctgctgctgctgcgaggtgggcccggccgaggacggaaagttgggcggcagcctcgaccgcgaggctgtcgacgagatggacatctcggtgcgacaggcagggagtgaagcgttcgggagggtgaggagagggagaagctgctggcggtcgaggaggaccaagcacggacaaagggagcccgcgcgcctttcttcgcagcgacgcgcacaagggacgcgtccaagcctcacgagccgctgcaacaaccctgtctcctcccagagctggcctggcgttcaacgagctggacctggcgacgatttaagtcattgaagagcacgaagagagcctgctctggaagggaagcattgaggttggcagcagcccgcccgcccgcggcgcgtcgtccgcctgaagcgcctgcgctgtctggccgcgggaggtctgtgccttgggaccacccgcctgcatcaaggtcgcaccatctccgacggcagatactagtgagatgctgcgagcacggacgacctcgtgattggttgaagtgagcttcaccgacaaccgatgggcgaggcggcgcatgagtcctaagtcaagcctgcccatccgcagcctggcccgcccatccccgttcaagcgtcgctgagcttgtgtgcgtggccgaccgtgaagctcctgtacttgtcctactgcctaacgagcatcgaccgagcgatggtctagcgcgcgacggctgcggccgtgtggcgtgacacgcagcgaggcctggcctgcagcagcggtcggcagagccagtctcgcctccggcagaagtcctccagcgagaacgtcagtcgagagcctgcctgcacaagcgtgagccgctcaagcgggcgtctgtcgtacatgcccgtcgttgggcgttgacggaggaggcgggctctggtcagctccgttgctctggcaaccattctcaacccacggtcgacgagagcttgcgtggcgcaccacgcgagcaggtgacgtgcccctgtcccttggagctgccgtagcacagctctcgagccgagggaggtcagcctcgagagggtcagcagcagcagcagcgcctcggaggatggcagcacaggacgttgtccgaggtctggctcgggcctgtcgcccccgctcgcttccccgccgagggcacgacttggcccgcaggctcttctcctggggctcgatggcggcccccttcttgccgctgaccgctgggcgcccccggcgccccttctcgtcgcctttcgccgttgacccgggatgaccgtcggccgccgccgcagcagacagtagcttgcctggcgcagcagcagctcctctttccctcgacaggggccgccaactgacactctcacccctcgagctgacagccagcagtcttctgaaagctaactggctaaagcactgcggcggactgactgctcggaccggccgggcgggtcgtcgaccagagctctcttcgcaagcgcccgctgcggttcagtccctccacctgcgtcggcgccggcgccgacgccggccggccggaattctcaacgtcatctccaagcctcgcagatcccttcgcccgcttcggccagcagaccctctccgaggggtagaattccgtggggctgacatagagtcagcgatgctggcgacagactgccggcggggcatcctcccgcgccccgcacgtcgtcggcctgcccagcctcgtataagaggcttcgggcgaggtcccggcctgtccccccttcttcccctcacagaccctctccctcatctttatcagcaagtcagcaagtcaacctccagcatcgctcgctgccatgaagcagttccagattagcggcgcgcccgtcggcatcgcctctatcgccctgtctgtccctcggcggccctgctagcctgcggtgctcatctggccgaccgtctgagctgaccttgcctccttctgcttttgtcagcactctattcgcaagcatgggcggtctgctcttcgtgcgtctcgagcttgcctcgctcggctcgaatcgacattgccgtcctcggatcaaacgaccttgactgacttttgttcgctgctccctcatcctctcagggatacgacactggccagattgcggacatcttgcctatgccggatttcaaggagcgcttcgcggatctgggtgagcctggaaaccgcgaattctcgaacgtccgggaaggacttatcgtcgccctgctcagcattggtacgcccagctctcggtcatgtggcttgagtttgtactttcgttgaccgtcccactctgcgcttcaataggcacgctcgtcggcgctctgacgggtgccggaatctccgaccggatcggccgccggcacgccatgtcttgtggtgcgtgcccacctctactctactcgctggccggctgctgacggccttcgacaactctgcagccgcggtcatcatctccatcggcttcatcatccagatgacctcgaacctgacggacgcttgggagcagatcatgatgggccgtttcgtcagtggcctcggcgtcggcgctctctcagccaacgtcccaatctatcaggtgcgctctgttgttgtgccttcgtgcttgacgtccgaccgctgacttcgacttctgacgttgctcttctccagtctgagattgcgcccaagcagctacgcggaacgcttgttggtacctaccaacttttcatcacaattgggcgagtatccgactcttctttcgctagctatcgacaactctgacaattctggctcgctcgactgcaggatcctccttgcctatttgttcggcctcggtacccgcgagatatctggcgccggcgcctggcagtgtctcataggcataggcttcatattcgcagccatccttggcgtcggcatccaattcatgcccgagtcgccggtgcgtcttgcgtctggcttctcctttgtcacaggactgagctgaccgaagcgccctcctttgccgctcgtcagcgctggctcatgcagcacaaccgacacgaggcggccaagaaggccctcgctcgcgtccgtggtacgactgtcgaggcccaggacccttacgtcgagcacgactaccaggagatctacgagtcgatcgagctggaggccaagctcggcaagggcacttgggttgagaccttcggcccccgtctccgcaagcgcaccgtccttggcatgttgcttcagctgctacagcagtggaccggcgcaaactactttttttacgtgcgttccttcgtctttggctctcttcaactctggctctctgggctgctgcgcacacccgactgactccctcccatcgcctcgccaacccagtacggcgccaccctcttcacaggcgtcggcatcggagactcttacgtcgtccagatcatcttgggtgctgtcaacaccattacaaccttccccggtctttggttcctcgagagattcggtcggcgcaagacgctcatttacggcgcgctttggcagagcgcttggctgtcagtgaccctctcacttgcacttacctaggattctgactgacacttcccctttcaaaaaaggcttgcatttgctaccgctggcactgtatccgatccaaacacaaacgacaacgtcggaaagtttatgattgtcgccgcgtgcctgtgcgtgtacttggccgactttctccccttctcgttgccagggctgattagtcaactgtttggcttctttccagcttcatcgccggcttcgcctcgacctggggaccgggcatctgggtcgtcaccggcgaaatgtacccgactcgtggccgccagaagatgcaggccctatcggtgtcttcgaactggctgaacaacttcgcgctcgccttcgcgacgcccttcattacggccgagatcggcttcacgtacggctacgtctttatgggttgcaatctcgtcggtgccgcgcttgtgtacctgtttgtcaaagagggccacggtctctcgctcgagcagctcgagaggctctgggaggaccacacggtctctgcccggcactcggccgaatgggtccctccgggctacgccaaccggaacgacgcggtcgagcagagctcgagcgagaagaaggcgatccggcgcgatatgggcgaggagtcgcacctcgaggaccggcgcgactcggtctgaaacctcccttacgagcctcaccatgtccgcccctgccaccccccctcttcatcctctcttacgtctcacgtactgtatcacctagtcttcgcgatctgcaatgaccatgtccatctcgctcgacgaccgtgcgtcctgctagctgtccttctcggcgtcgacgttgatccgcctgctgcggacgacgactcggtcgccgagggcccatcgcgccgagcgagtcgccgtcgacccatcaccggttgtccggcgaacggggacggcatagacgccgagcgtcggacagggcacgccgacgtactgcgaacgagcctcttatcagcgacggcccgacgactcagacatgaaacggacgctgcgcgcacctcgtcgacctccttcggacgggcggcgacgaggaccttatgcggcaacgtcggatgccgggcgcccgtcactggatcgacgtttggcagcttgcggaggcaagagggcaagaaagagagacgtcgtcaggacggaggtcggcgctcgtcagctagcgaatcaaggaaggagagatgtaccgtacaccgcccacagcggccgacgacgtgcatgtcccagcgctcgccgtcgttcttgtcggtctcgccgtccttcttgtcggtccgatcgccgacttcgagcgctccccaattgtcctccgggtaggcctgctcgagcggcctcttgccatcgggaggcgtcgggtgtctggaaggggtcggagtgagcacgacgtttggccggaagcggtcgatgagtgcctcaggcgagcggtcaaagatcctcggctcggccgcgaccgaaggcgccggcagagctttgtcatagacgaagatggtcgaccagtccatgcttgaccagcttgactgtttgggcgaggtcgagctcaacgggtcgggattcctgtaggcctcgaccggcggcgggtgggggttggcggtcgacgagccgggctcgccctttaccggccggttggggcgcagctcgctcggctggtcggagcgggcgatggcgaccgagaaggagacgagagtgggaagggtgacgagatggagagcgtaggtgtctgcgaaggcctgcgcggccagacggcgcacgaccaggtgtcagcgcacgccgttgtgcctcaaaggagagagggaagagggacgtaccgtcgtcaccgcgccatctcccatcgcccctgcctcgcccgccttcttgcctggtgcgcgccggccttctggatccttagcgacgatccggaccggccgacctaagaaatgagagaggacctggttcgcgcggtgcgtcggaggcggcgacagacccgtgagggagaggccccagaggtcgactgagagtctgatggacgtcggatgtcagcgttaagataatctgagcagcagcgctgaccaaaggacggtcaagaatcgactcacctctcccactccttccgctcagtctcgcccagctcgagcggaagcacaaagcccggcctcttgagctcaattacagtccgaagagggataggccatgtccaagcgcccgagacggtcgtcctctggccgatcgccgggagcaggacgaggagcgcattctcggctggaacgagcgagggctcaatcaggaccatctgggcggccgggcgacgatgagggggagggtcgggcgtcagttggcaagcgcgccttgcaggtacggcgaggagatcaggcgctcacccgagggcactgccgggcggtcagcgccttgaacgagactccgtcgacaatcatccactggcggtcgtactgccggtcggcgcgaaagcgaagagaaaggttgcggcggccgaaggaggtcagcgctggacaccacaaccggctcggaggacgacccatgtcgctgaatttgcacgcacgagcaggccatcaggcgtgcaggccgacgagtcgaggtcgattcccttgcagctctgagaaattcgaatgtgctcgcgacgagggtcagtgcgcagctcgaggcgggacgagatggcggaggcaagggccgcaccttgatcgggtagacgatgagccggctgatggtgaaggcgtcgtcggccgacatgctcgctgatcgtgctggacttcctggtgctatcagggcagtagctcgagctcgtctgtcgtcgttggcggcatgaggccgacaggctggcggcgctggccgtcggtcgggcatgcggggttcgagtgacttgcatctgcgtgtcgagaatttggcccgcgcagctgaagccagcgcggaaggacggccacccgacgcctggacctcgacaccaacacacctcccttctctcctcaccccgtaaccagacccaaaagccatgggacgtcgcgcgaagaacaagcaggctccgccgcaagagtttgcgaccgcagccgcggccgcgccctcgcaggccaagcgcaaggccgacggctacgtccctcgctcaggcggcaagaagctcaagctcggcccggacggcaagaagatccgcaaggcgcctgcgcctaagccggcgggcctcgttgcgcctggtgcggccaaggcggccaagggcaagggcaaggccaagaacggggaggagcttctgtacgtgcgatggggaccggagcaaggcgccaagagcagggcgcgcggggtgtagctcggacgatcctcctctggaagcgtcgtccgaccgcgcctgcggtgcttctatctgccctgctcagccccctactgactctgattggcactttcgcttgctctgtacggcagtgacgatctcgagggattcagcggcggcgaggaggacgacgaggatcagttcggtctggccggagggtgcggcttcgctttagacctcggcctccgtcgcctgctccgttccagctgacagcctcctctcgctggctcttgccctctcccttcttgttctcttcagcgagggcgacgagggcatgccggcatgttcagcactctgctgctcacggcgcggtccatcaaagctgaccctgcaacctcctctgctcttgctcctcagcgtccgccgccgcgtgagatccagttctctgactctgaggccgagtcgaacgtcagtctcccttcggctcagctttgggcatgcgatggctgacttgcatactacgcaacgggaacaggatgagtcggacggcgagacgggcgacctcccgccgggagccgacatgcagttcgaccttgaccagggcgagttcccgaccgactctgaggacggctcgtttgccgactcggatgaggacgacgagctcgcgagcggcgacgaggagatggacacgagcggggccgagacgtccgaggacgaggtcgatgccgacggcaagaaggtctcggcctttgacgacgaggacgacatccagacgaacatcgagggcgacgacgacgagatggacgacgacgacgacgacgacctcgaggagcgctttgaccttccctcgctcgaagagcgcgaggccgagaaggcgtccggcgtcggccagggcggtcttcgacggatcgagcgccggctaggcgagctcatccgcgtgctcgccgactggggcaagctcggcggcaaggacggccgctcgcgagccgactacatggagcagctcgtgtctgacattgcgacctactatggttacaacgagttcctcgccgagaagctccttcagtttttcccgctgtcggaggcgatcgcctttttcgacgccaacgagacgcctcggccggtgacgatccggaccaacacgctccggacgcgccggcgcgacctcgcccaggcactcatcgcccgcggcgtcaacctcgagccgatcggcaagtggaccaaggtcgggctccaggtgtttgagagcgcggtcccgatcggcgcgacgccggagtacctcgccgggcactacatgctccaggcggcctcgtctttcctgcccgtcatggcgctcgcgccccaacctggcgagcgcgtgctcgacatggcctcggcccctggcggcaagacgacatacatttcggctctcctccagaacactggcctcgtctttgccaacgactcgaacaaggcccggacgaaatcgctgacggccaacgtccaccggctcgggtgcaagaatgttgtcgtctgcaactatgacggccgcgagttcccgaaagtcatgggcggatttgaccgcgttctgctcgacgcgccgtgctccggcacaggtgtcatcagcaaggacgcgaccgtcaaggtcaacaaggtacgtccccgccgtgcgaacaggccgcggtgcttccgacatgcgcaagctaaccagcttcttcgtttctcccggccctagtccgagcgcgacttccaccttctctcgcaccttcagaagcagctcatcctctgcgcgatcgactcgatcaacccggactcgccgacaggcggctacctcgtctactcgacctgctccgtcaccgtcgacgagaacgaggccgtcgtcgactatgcgcttcgcaagcggccgaacgtcaagctcgtcgagaccggcctcgagtttgggcgcgagggctttgcgagctttcgcggaaaggactttggcagcaagatgaagctcacccggcgttactggcctcacgtccacaatggtgcgtcctcgtcggccccctcgctcagggccatgtgcattgctgacacccttcttcgcccccccccccagtcgacggcttcttcgtcgccaagttcaaggtctcgcggatgcccaagaaggcccggttggcggccgaggccgaggccgagcgcgagggtgtgtcggacgtcgaggacgagtttgtcccgctggcgacgtcggtcgaggaggaggagcgccaggaggccgagcgtgcggcgatcctcgaggagagcagcaaggtgacgtttgacgacgccgcggacaaggagctcattcagggtacgtccaggtcgcatccagaggtcctggagaagccgtcgctgacctctacccttttccacctctcatcagcctcgcagcgcaagtacctgaagaagaccaagggcatcaacgtccagccgcggaagaaggtgtcgaccaatccggagtctgactcgacgccggcagagctgccagcagcaaccgagctcgttgccccggcgccggtcgaggccgagacgaccaagccgctgatcgtcgccccgacgcccaagccggcggcgccctcactcaagaaaaagagctccaagggcgagatgcgcaaaggtcgcaagtcggcgtagagttagacgctcctgacgtgcggttgtctcgattgcggttgtctcgattgcatgacacccgcgtttgcagccaattcagctctcaagcatctagaagtgcaaggcgacatgccagagactccgcaaggccggtcgtgtaaaggtctccagcggctctagtcgtcctcatccgagtcggtgagctctagggccttcattttgagctgacctctagcggcggccgctcgtgtcgcccgggccggccgcgcaggggcgatgacctcgatctccttgacgctgaggtccgagctgccgtcgtcggaatcgagatcggctcgcgttcttttccgcgccgatgaggttggagtcggcttggccgcaggcttcgtcgacgcgcgagtcgttctgggcgtcgactgggcagcagcagtcgctctgacggcggctactcgagtaggccgacggctcggctcggacgccgggaccgtcggtcggcggagggtgacgcgcggcgtcgagctcggcgacggcttgctagccaaggtcggtaccgcaagagggggcgccctagagggcttgacctcgccgtcgaggtcagagtcgtccccgtcgtcttcgtcgtcctgggcgtgcagactggcgagtgacttggggttgagaggccgctcgacaatctggacgtcgtcgtcgtcgctctcggcagcactgtcgtcgccgccgccgttgccgtcgctgtcgacaaggaagcctccgccgtcagagctgagctcgattggctcctgcttgacacgcggtctaggcggcagccgctcgtcgtcggcgctctctccttttgtcggcggcaagcgatgaatgtgcttgtcaggcgagggcatctcgtgcggtcgaactccgaggtcgacctcgatcggaatgcctttgtcgccggtggtctgcaaaggggaggtgaaatatcagcgcgaccactcgagagcgaggggcaacgcacaacccgacgcacctcgccgttgccgtactcgcgctgcatgcgccggcggatcttgaggccggtgatgagccgctcccagcccttaaggacgcgctcgcgctgcttgacacgggccttctcctcttcgatcgcctgctgctccttgtgggcctgttacgcgagaatagcgtgcgtcagctaagggctgcagggagggcgagaacaagaaccgcacctcgagaagcatttcgacgttctcctctgcgacgacaattccctgcaggaccgggatcgccttcttctgcttctgcttgaactggaagtcgacctgcggtcgcgaacgaaagcgagaagcgccggtcgtcagcaaaccaaggtcggccctgagatgctcatgctgggacgaacgcaagcatcggcgtagctgatctcgagcttcttggccgtcttgccgatgccagcctctgccagggtccgaaagagtgacggtcagtcgacatagaaatgacaacctcagccttcagagagaccgacgtttcaggtgaacggctccgggcggcagcatggtcggcacaaagaggtccatgttgccgtactggttgcgggggatgtggccctgttcatttcgaaagaaggagtcagttcgagaattgtgcgttgaagccctgatctcggccggcaactcacattcttaatccgcggcgggcggacgagccgcgtctgggcctgtgagtagagcggctggcggacctcctcgcccgtgcgctccttctcagcctcgagctcgcgctggcgctgcttcgtcatggcccggaccttgccccacttcatcggctcctggccgtgcatgacctcgcggccctcacgcagccagccggcctcggccttgaccgtgtgaacgttggctcgccggtagacaggctcacccttgaagagcgagtgctggaccttggggtggatgacctgcagggacgtgacgtggcgctcgagcacgtaactgcggcaagaggaagaggaaggctcaagtcagcgcgcgttcggaccctccactgggcataagagcaagggaggggcacggactctggatgattcttgaagccctccatcgtcgtcggcatcgcgccgacctttttgcggaccttcttctgcaggaggtcgtcctcctcgacgtctcgcgcctgtaggtaccagttgaatgcgtcaaatgagctccagcccccgtcgctccgccaagtcgacgtacgagcttgtagtcgcgcccaagcacccggacgagatcgccccagaagtcctcttcggccccgccccgtgcagcgcggaggatcggcacccgctgcttgagcgccttgtcgagcccgccggcactctcacagtattttggcgtcaggtccttcaccgttccgtctgaaatagaggagagattgtcagcattaggtcagaaacgcggaggacaggtgaccgcaggtgaccttcttcgatccctaggacgtagaccatgcggttgcgtgccgtctctttgcttcccttcggctcaaagctcgcaaggcgccgggtgaagccccggatcgggtcgacggggatccactcctgatctggccgagagaagacctcggcccagtagatgggaggcgttgtgacgtcgaagggggctatgaaatgggcagcccgtcagcaaggcccgggacaagtcgatccgaatgaggctcaccgcttgggtcggtcgacttctcgccgactttccggcccttacccttccacttgccgcgagtggacccgcccgtgcccgtcgccgggttgcccgagccaaccttgccttcaagcgtctggccgggcgagcccgcaccgaagcctccaagctgggcgccgagggtcgacttgaggccgggcacgcgctgcgacgggaggcggtcgatccagcggacaaagccgccgttcgacccggccgaggtcgaggcggagttggcagcaggtggtggcgccggtgcaggcggcggcagagcgaccggctccatctcgacgtcgtcgtcatcatcgctcgtcacctgggccttggccttcgacttgcccttagttgcactcgtcgttgacgtcgccccgtcgcccatccgccaactgacaggctggaggctgacgacaatgcgcgatccgatcccgagcgcccggcagcaggcaacaaagagaacagcgccgaggtcgcgcgagccggccatctgaagcgccttcttttggagcgacttgtacgatcgcaggagctcgccgccgtgggttttgccgagcgcgtcgagcagcttcttggccgccttcttgctgatcggcggcttcgagggggttgccgttgcccgccctttgcccttccggtcaatcttgccgctatttgaagatgaagccgtcggattgagcgacttgcggatcgcctcgcgctcgtcgtcgagctcgcgggccatctgctcggcctcagcccaggtccggtaccggatgccggcgcgccagtcgacctcccactcggccgaccaccaatcgacgagcgcctcgagcgcgcgctcaaacgcccggccgcgcgttgtccggaccggcatgttggccggcgtgatggctgcaaaggccaaggtgagcgccggcgggaggagcgagaggatccgggcctggagcaggggcaacgtcgtctgctgattgagggaggcggccgaggcgaggagtgagacgaggtggaccttgtgagcgttcaaacgggtcagtcgctcggccggcgtatagatgatggccctggcaaccgatcagtagacagtgtgagtcaggaggcgaacgaggcacgcgcgcaggccgcccggctccgagctggcgttgcccaggcggagcagcttcgccccctagcgacccagacgcaccgcttcttccccttgccctttggatcacgctcctcggggacggcaatctggacctcgatggccggccggttgccgcctttgccgtccctaaagacgggtcgtgccgctgcgccttcgccgtcgccaccggctgctgctgctgctgccttggcctcctgtcgccggcggaggacgagagccgggtgctcttcgtcgtcggcctgacgcgaggcgagcggcgtgttggatgggccggctgcttccgctgacaactcaagcccgacctcctcaaactcgtcgtcctcttcgtcgctgtcgtcgtcgtcatcgtcggtcaagcccgcgcccggcttgcgatcgtcggtcgcgttgccggtcgacgagtaggcaaggttgtagtcgtcgtcctcggttggctcgagcttgacctgcatcggacctggagagagcgcgagcgagatggaggcagaggggtgtcggggagcaagacaggagaggaggaggaagggaggctcgggcatcccctcgcgtgccttgccatgcaggaccgcaggaatgcttaacctgtctcctcgcatcacccgcgcttcgaagcgcgacgagctgcacttcgccgttctggcgaccgtcactcctcttctccagcagcagcagcagtcaagatgagcagcatagacaagtacctcgaacgtcggttccttttctgtgctcgtctgatgatgcaaagcgagctgacgaatcacgccctcgcccttcgcagagcaagtgcttgtcctcctgcacgacggccgcctgatctccgtccgtctgccctcgctgctccctcccaatcggctcgaggctgaccgcgccaacttctgcaccttactccagggccagctcaaggggaccgacatccacaccaacattatcctcgccaacgcggtcgagcggctctttgcggccgacgagccggtcgagatggtcccgctcgggctctacctcatccggggcgagaacatgtgcgcctctctcgctcctcctctggcgtcctgccatgagctgacccgtcactatcatctctgctgcctctcctcccagcgctatcgtcggcgaggttgacgccgacaaggacgcctcgttcgactttgcggcggcccgcgccgacccgatcgacccgatccacttctgagaaggcaacctccggcccgacgccaggtcctcctcggcccgcccgtccattctcgggcatacctggtctctgggcgaggcttccaggccgtcgtccgacgcgcgaccgaggcctggcgcgcggaggccacctcacaacctatacccctgactcaagcgagcgaggctgccgcctcaagacctggcctccgcaaaaggagagcttcaacgcccaaggatgctcgcttgccgaaaaacatgataccccttcgagaccgctcttcgagaccgcccacaaggtctcatcaaggcctggcatgctcggctgtcttctgtgaccttagcggacaaggtcggcctatgcaggtggctggtaggcctttggcaggcgactttgcatgggtcgccaacgctctcccagccgctctatcgccgggagcggcgcggatcatgtcctttcccgaaatcggttcagtgagcacgagggtgcgcagaggcgagaccgcagaccgccgtcctcccacgcgaagtaggcttgccaaccgcatctcctgcacagcgcagatgacgaaagagggagagagcagattgagcgcgaccgaccgtgccagccaacgagagaagccacctcacctcgccagcgtccgccctcgaggcatcgggcggagggctacggtgctgctgcgcgtcgctcggcttgccttgactctcgccgttcgactcgcccagctcgccttctcgccaaaccatcaacctcttacgaccatcccctccttccgacaactaatcgactggcaatgagcacgaacacctcggtggttccactgccgctggcggagctccccctctcgtgcgtcccagtcgccactcgtctccaggtcgctgtctgctgacctcgccgctcggcccatcagcgccgtctcgcccggtcaaagcctcgctcgctctacgctgccctgggacatctgggagctcatctgggagaccctcctcgctaatcggccccgcctatcgctcaatagcaacctggatctcgtccggcaggccgcgcacgagctcgcccgctacagcttcgtctcgaccgactgggccggccacttccagcgccagctctggcaggaggtctctttcggcgacgtgcggtctccggcggtcatcgatcttgtcgagcgcttcaccgcgacggccaaggcgcggccgtgtctcgctggcatcgtaatcgtgctccggctcggtggaggctcgccgcctccgacgctgctcggcaaagcggccgagagcgttctcgctgctctgacgcagacgctgtgtggcttgtcggcgcttgaggaggtcacgcttgtcggtccgatggtcggcaccttcctcgggaagccgaaaagtagcatcccgcctcggctgcgctcagtcgttctcgccgggccgccctccgacctctacatctccctccgcaacctcgctcagatcacgtccctccgtctcaaccatccggcactcgctacagctaccttcctggatcgcgttcacgaacaactcggacgtctcaccgcgctcaacgtccagcaaatcgcgctgccgctcgaccatccggctatcaccctcctgctcagcggcgactttggccgccggctcaaacatctcggcctcctcctcagtccaggcggtccgacacaatgctattcccgtcagctgctcgccctagcgcccaaccttcggtcgctcacactctcgactcgcgcggccgacatctcagaactgccctcgctcgcacacctcgggacgctcagtctctgcgacgtcgaccccagcgatctcccgcagcggctgacgacggtcctccggcagctggtcgagtgcctcgcgcacacgccctgccgactcccatcgctccgacaccttgagcttggacaacggccggccgagctttcaggcgacgaacccagcgccggccaggctcgagagtggctcgacagactcgcgcgcagcgggatcgccgtccacttcgcgtcagaggcgatcatcgacgcgcccgacgaggtccctgcttcaacctggacgcgatatcggaatcgacagctcaccctccaagcaaaggaggctgaggaggccgaactgatggcaacgatcgcggccgagcaagaggtctgggtcgaaagggaccgccggtgggcagagaaggaggagcggcgacgcgcaagacgggccagggtcaaggccaacccttttcaagcggaggcagccgggcagggtgcagtggagtagcgtacgtctcccttgcctgactctcacacgcgtcgcgttcactaactcgcgcaccttccatcgtgcccagcccacgacggctgtcgcaaacgggatgactctgagatgtttgacaaacgagcgccttttgacagcctcatcttgtagatgtcgcaactcgttctcgatgaaagacttccgtttgagtgtcgggcggcgtgcatgtgacagcggtgccgccgcggcgggccgaggacgacgtcgacgcaagagctcgtcgtcgcctgtcgtccgaccatctctcccctcttccctcctccttcaagatgggcctccatcccatccctcctgcagcgcggagactctctcccgaaggcctccagactgcctcgcagccggtgttgcccgcccgggcgccgagcgacagcctcgcagcggcactcggctcgcctccgcaggccgacggcatcgtcggcctgacctatgccgcccctccggccgctgcaccggcgacggccctcccctcgcagagcttgacgacccagatctcggacctcttgctctcggctgtcgtccctgctggcattcccaagtcgacctcggcctcggcagcggctggcccgcgcaagctgagctcgcgcaaggaggagctcaacctgacgagcacgaccggcaactttcgcaagtttgtcctcaagattggcgtcgtcttctggctccaggatcgggtcgaggaggtctttacctggcgcaagccggcctggagcgtctgctttgccctggcgtgggcactcatcggtcggtcgcccgccgcttgacctgccagcccgcaagggaccgctgctgatttcagtcacgagccatctcccatctccttgcagccttttaccctcatctgctgctgatgatcccttcggtcatcgcgctggccgtccttatcaacccggccgagacgcaggacaaggtcggcatcgcgcgtccgtcggccggtttgacagccgcagggacggccgctccaggcccagcatcgacgtcaccgacacgacgcccgtcgaccgcctccggcccgaccactcattctgactgggaaagccgcgttggaggaggctctcacggacggagcgcttccatcgccggcgtcggtgccggtcaagagcgcgacgccagagcgggtcggagggactcgttctactctgaggtgagccggctgcgcagctctgtccaaacaggcgcgacgctgacaagccttcttccttgctttgcctgcagtcgccctcagaaaagaaggctgcctcaaacatgccgcccctgacgcaaggagggacgcccgagtcgctcacgacgacctattattccaacatccagggcatccagaacctcatgggcctgttgtacggccagcccccgcgtctccttctccatgcagcggatgaagcgctgacagcgaccgttctgtcagctcggacatgcacgatctcgtggcccccccgctcgcggctgtcacctcgccggctttcccgctgcataatgctctggtcgccaccaacgtcctcgccctcgtcggcgtcgcactcggcggaggctgggtgccaacctgggcggtactccttccgctcggctggggtcctcttctcgtcggcgccatgtcagtcggagcgaggctcattctctcctcaacgcaaacgctaacgactcttacctctctcctagcccgctctcgctctggtcgtcgagctcagcgctcgccccctcgccctcccttctcgccccgctcgacgagacgtaccgcctgctgctcgacgatcaggtgccgtcagacctctttgctctgccccgtgcagaggtttcggtctgggagacgcagcgctggggtccggtcgaggcgagcgcaggcggcggcgagggctggagccgcagccgatgggagggccgcgaggtgggcagctcggtcacgggtgcccagggagccgagtgcgttccttcgggtcgatctcctgcctaagtcttctagaagctgataatgccctctgaaacgtccagggtcagctcgctcgagggcatcctgccgacgggcggctgggagtggctgccgcatgaggcctggtcaatcgatcatctcggaacaagctggacgccgtccttcgcgcggctcacactcggtgcgcccctctcccggcatcctttgacttggcagcgctgactgtgcaattttaccgtagacggctgggtccatctcgacgagagtcaccgcgtgttgccgcggagcctggacgacgagaagcagggcggcctgcggaggcggcgctggtggcggcgggcggtccaggtggacgtctgagcgagctgttgcgattcgtatactgtacactgcttcgcatcgaaagcgctgggattgcgacggacagacacgtgcaccggagcctctgtacgcatcagtgttcgttcgctgcccgaggcagccacagctcgtctcgagcctccgcctcctcaaccatcgacagcgtctcaccctcagtcatgaacgccatgttctccctccctcaacgtgccatctacgtgcgtgccgctcgatctctctcggtcgttcattccgtctgacgagctctgctgtcgccgcctgtccatccgaagacggtcgacgcgagctcgccccttgtcctctcgccgacctcgacgacgcccgcgcttggcccgcggacgacggtcgtcttccggaatctcgctggcgagggcaaaacctacacgctccagggctgctccgtcgccaaggtcgtcatcggcgagtccctcgtcctagagctgcggctgctggcagctcgccgtcgcgctgtcgtcggcttcggctgacacttgccccctcccctcgcaaccgcgtcctctcgaccccagacggctgctccggcttcactctccggatcagcacgccgctactgacaggcacgctcgagatcttcaactcgtccggcctgacgatccacctcggctcggccggcgcgcccaagcccgtcgcttcgacagtcctgctcgacccgccgctgccggacgtccagttcgtcgtcccgctcgcccagccgtcgccgagcttcgtcctctcgacaatcatcccgccttcagcgaaggtgacctcgcccgaggctgcctggtcagggacgacgcttcgagcggctgccgacggcgacggcgacggtgctgaagacctcgtgctgcgcgtcgctccaccaccgagcggagggcctgatcagcacacggtcagactcgtgcgggacgaagctggcagctggcgctgggcggtcagcggtctcgagcgcgaggaggcaggcggcgagggtgacggctacccgatcttgcgatgagcccttccagcgatgcgcgaggctgacggacagatggcagagaataaaggcatggctacaagctcgacacgacatggggatcacgcggtcgtccccgacatgtcgccgtagcggccgccctcgaccttgatctcgtcgagcagcgcccggatctgcttgtgctcctcggctgagagcgagacgtcggccgcctttatattctgcttgaggtagctgacgcgcttcgtccctgggatcggcagcgcgccattgccaatgacccaagcgagcgcgagctggccgacggtcgcgccctttgcctcggcgagggcctcgagcttccggacgagcttgaggttggcgtagaaggcctcgccagagaagcgtgggagcgacttgcgccagtcgtcgtcggggatgtcttcgggattgagccacttgctgccgacgaggccgaggaggccgcggcctgtaataagggaagcaagggtcagtgttgaaggagaccgtgcgaagcagcaagccgggactcacaaaggggcgagtacgcgacgacttggacgccgagctccctgcagacgtcgaggacgccgttcgtctcaatgtcggtcgtaaagagcgagtactcctcctggatggccgcgatcggcgcaaccttgtatgcccggcggagcgtttccgcagacacctctgagaggccaatgtagcgaattttgccggcatcttggagctccttcatcgctgcaaccgtctcctcaatcggcgtgttggggtcgacccggtgctggtagtagaggtcaatctgctcgacgccgagccgctcgagcgagcgctcgcacgcctcgagcacgtacgctcggtcgccccggacgccggtgaacgagccatcggcgccccggacgatgccaaacttggtgcagaggaagactttgtcgcgctgcgtctggagcgcatgcgagagaagcttctcgttcgcgcccgagccgtacatgtcgctgagtgagcgagggcggatgagcgggcaagatggttagcctagcgtcaagagtgaggggccgcactggtacgcacgccgtgtcgatgaagttgacgccggcgtcgatggcggcctggatcgtctcgcgaccctcggcctcgtccgcggcgcctgagcagagtcagcagtggtcgtcagctcctgaatgcaggcttgggctttggatccggagcacgcaccgtaaaagtccgagaggcctgcagagcagcgggagtacgtcggtcagcgccggccagagggtcgcaagcagggcagctcgaccaggccagcaaagagcggcgtagaagacgcacccatggctccgaagccaacgacgctgacctggttgccgtggaagtcgatctggcgaggggcgggcagcaagggaggtcagcttgggcggagaggtcgagaaagctgctgcggcagcagaagcagagagggacgacgacggacggtacggatggacatgcttccgatggtaaatgaaagggaggcggtcgagagggtggtgggtgatggtggaagagaaagagggagaaggagatgccgctatttaggtcggctgaaaggagtgggtggagggcgtcgacgggtcggccgaggtgcggtcggtcagggaatgaccctcgtacgcggcccttctccacccgcctagaggccgaggccaggccgagggtgcagctaggatagaatggccggcctacagactctcgtcgatgctgctgctgctgctgcctgctgctactgctgctgctgctggcaggctcgtctgagcgagtcgtctgcgtcgacgttgctacgcgggcgaggccagccagcctccaccctgcacgacacctccgaccaacgagccgccttgtccccttgaccaccaccatcctgccccgacacaaggcctcccacgagcgagccctagtcctccaatgccgcctgccatcctcgtgcgtctgaggcaaagcagggagtggctattcgcagatctctcgcgctttcgctgacgtcgcttgccggctcggctctctcgccctccggccgcagcccgatctcccgaccgagctccatctcgccctcattcgccaggccggcctcgagctcgagcacgcgagcgagcctgctgaatggaggcgactcctcaagaacctcagtgtcgtctgctcggcctggtcggtgcgtcgccgcgtgtcctgattcccgctgatacttcgctcaacggttgatcctcgctccgcatccaatctcccgcaggaaccggcccagagcgagctcttccgccgacacaacgcggactcgcacaggttgacggcaatgctcgaaagctgtccgcagcttggtcgtttcgtcgtggttgtcaacagtggctgggacgtcacagagtctgtcaacagcgactgggacgcgataaacgtggtgatcgaccagcttcacctgctgcctcggcttcgaaccctccggagcctcttatggtgcaagatgccgcgaagtaacgccggcaagcaggcctcggaccgtcctcggcctctcgacttgacgctcaacgtctcatgcgggccctactggaccctcggggcgccctcgcccgactacgtgcacgccgcgcttgcaacgcggctcgacctgtctgacctccggcggctcgagcttcggataggcggcgaccaggtcgttgtgcagtcgctcggtctcgaaggcctcgcaccgcgcctcgaggacctcacgctgagcgcctgcatcgagcacacctaccttgagctcgtcctcgtcgcactaaacccggatcggctccggtcgctccgactcaggacagccttccagcctgcagacgaggacgtcatcacgccgcgggagtacccactcagccttcatcctcacccgctagtcctctttccgcagcttgagaccctccacatcgacttcccgccggaatccagcctcttcgccgacggtcacgcggccctgacgacggtcgtcttcctcagctacaacccgtggttcgacgagctcgacgaaccaggccacacctttacgcgcagtgccatcacggccctctgcaacggtgccgccgagcgaccatcacgcttcccttcgctcaagacactcgtctggcatcccgtccttgtcaacgacaacatctttgcgacgctcctcccggacctccgctcggtggacgcgttcgtccgcgaggtcggcctggcgttcgaggatggcgaaggacggagctggtcgtcgcgtctgcgagagatggaaggctgaagcacaaggcagcggctgagatgcaagaactgctgcgagccctgcctttccggtctgcatgcccgcggcctcacctcctggtcgtccgtcgtctaaggggtcatcgcatcaaagagaagtaccttcttggtgaggacctgagggcgtcgatgggtcggccgaggtgcggtcggtcagggaatgaccctcgtacgcggcccttctccacccgcctagaggccgaggccaggccgagggtgcagctaggatagaatggccggcctacagactctcgtcgatgctgctgctgctgctgcctgctgctactgctgctgctgctggcaggctcgtctgagcgagtcgtctgcgtcgacgttgctacgcgggcgaggccagccagcctccaccctgcacgacacctccgaccaacgagccgccttgtccccttgaccaccaccatcctgccccgacacaaggcctcccacgagcgagccctagtcctccaatgccgcctgccatcctcgtgcgtctgaggcaaagcagggagtggctattcgcagatctctcgcgctttcgctgacgtcgcttgccggctcggctctctcgccctccggccgcagcccgatctcccgaccgagctccatctcgccctcattcgccaggccggcctcgagctcgagcacgcgagcgagcctgctgaatggaggcgactcctcaagagcctcagtgtcgtctgctcggcctggtcggttcgtaccgcttttgttctcgctcgctgacgatgcgttcaacccctgactcttgctccgcatctcacctcccgcaggaaccggctcagaacgagctcttccgccggcacgacacgggcccgcgccggctgacggaaatgctgaagagctgcccgaagctcggtcgcttcgtcgtggttgtcgacagcggctgggatgacgtgccgatcccggccctgctcgatcaactctacctcttgcctcgactcttgatcgtccgaagcctcacctggagtccgaggccgagaaccgacatgctggcctcgcaccgtcctcggcctgtcgacttaacgctcaacgtttgtcaagggcgccaagccgcgctcgcaacgcgactcgacctgtctgccctccggcggctcgagcttcggatacgcgatcactctgtcgccgccgcccggtcgctcggtttagcaggcctcgcaccgcgcctcgaggacctcacgctgagcgcctgcatcgagcacacctatactgagctcgtccgcgtcgcactaaacccggatcggcttcggtcgctccgactcaggacagccttcgagactgcagacgatgacgtcctcacgccgcgagaggacccactcaaccttcatcctcacccgctagttctctttccgcagcttgagaccctccacatcgacttcccgccggaatccagcctcttcgccgacggtcacgcggccctgacgaccgtcgtctttctcagctacagcccgtggttcgacgagctcgacgaaccaggccacacctttacgcgcagtgccatcacggccctctgcaacggtgccgccgagcgaccatcacgcttcccttcgctcaagacactcgtctggcatcccgtccttgtcaacgacaacatctttgcgacgctcctcccggacctccgctcggtggacgcgttcgtccgcgaggtcggcctggcgttcgaggatggcgaaggacggagctggtcgtcgcgtctgcgagagatggaaggctgaagcacaaggcagcggctgagatgcaagaactgctgcgagccctgcctttccggtctgcatgcccgcggcctcacctcctggtcgtccgtcgtctaaggggtcatcgcatcaaagagaagtccagcgcaagcctgcgcgcacaaagagagagagccgtttactccttctcgcccgacgtcttctcctcggtctggtgggtgaggatcttcttggtgaggaccttgccctcggtgtcaagcgtgtagacgatcgggacgcccgtctcgagctcgaggccggtgatgtcgtccttcgagatgccctcgaggtgcatgatgatggaccgcagcgagttgccgtgctagagtcgcgaggctcaagtgatcagccgggcgttcaaagcagactcggcgcgaagcaggaggacgaacagcggcgacaaggaccttggcgttggggtgctccttgaggacggcggggaggatctccttgaagtagtaagggagcgtgcgggctgcggtgagctgtgagggagggaaattcaggaagcaggggggcgagtcagtaggtgctgcgacgccgacgacgacgacgctgcgcaaggacggacctcgagcgactcgccagtcttacccggcggcgggacgtcgtacgagcggcgccagatgtgctgagaggaggcgtcgggcgtcagtctgtgctcgacggctctcggaaggccgtgcggtcgggctgagcccgagccgaagcgccgaacaaaggcgaaagggaggcaagacgcacgacctgctcggctccccacttggccttggcgtcgtccttgttgaggccggtgaggtcgccgtagttgcgctcgttgagagcctcgtccttcttgacgtcaatctttccgtcgaggccgagctcggtcaggatgatcttgcacgtgtcctgggcgcgcgagaggtccgacgtgaaggcaatgtcgaactcggtctggccgttggcgatgagcgacttggcgcccgagagggcctcgttgcggccgaggtcagtaagcttagcgtcgtaccatccggtgaagaggttcctgagacaggtgcgagcgagggtcgagggtagggtcggagggaagggaagatagagaggagctcgtcagctttgatgcgcgcggcggtcggtcgctttagcagttagaaatgcaggcacgcacttgaggttccactcggactggccgtggcgaacgaggacgagggtcatgatgaagaagaaggaaggggatagggttcaagcggggagggtcgtggtcgagcgaaggcggcgtcgaccgagatggggcggccgaaaaggcccaggcgcgacgctgcggcggcagtggcagcgcggccgattgccgtctaagtggccgaatggatgcggcaacggttcaagtatccctcttcgctcgacatcggccgacggcagacgtgacaaaggcctttgatctacatgctacagagggtgcgagtacagacaggagcggagggaagcgtgcgaggagaggcgagaccgagagtgtgtttttttaatgctacaattggagggcaaaaccggaatgcgagacgaagcggaaggaagggattcgaggggtcgagggaagatctctaaggcgagccgactggcctctagctgggccacggccacggcgtctagaccgagttcgagttgtcagcgcacgtccagggactgctgccctcagccttgatgaggtcgaggatggcgccgtacgcgccgccgacggtgaagaaggaaccgcagcaaaagatgaggagcgcccagaagacgtggaagcggtagccccaggttttgtcggtcgcccagcggtggcggttgtccttccaccagaccatgcagaggagctgcatgcagagcggtgttgcaaagatggcgccgaggagaccgacgaggcctgggagacggaagcggtcggatgaagaagggtaagcgacggcaagacgggaagcagaggcagggggtctcgccatgacgcacctccaaagaccgggacggccgacgcgatcacataggagaaaagcatgcagccggcacagcacgagagccagccgatccagtgggtgaccgagttgtcggtaagcgactttttgccgtggaagagccggacgaagatgtacttgctcgacatgtgcgagaagatctgcaggttgcggcagcgagctcgtcagctctctcggcccgacgctcagaggcgttggagggcaggacgtacgcagacggtgacgaagagcgcaggaatcgcgaggccataggcaatgcgcttgaggagcgggccggccgagccgagcgccgggttggcgacgtattggccgcagcacgcatagacgacgacgccgacgatggtgtagacgagcgtgacgacgacctggcagaggcccatcgccttgttgtagtcgcgcgggtcgcgcatctcggcaatgaccgggtagaaagccggcgtgcccgagaaagcaaagcagacggtcgcgatcgcgttcatcgcctcggcaaaggtcgggtcgccgacagcgacgacgtcgagcttccagtcgccgaacatgggcgcgtcggccggccggtcctggacgccgacggcgatcgtgacggtgccgactgcaagcgagacaagaatcgtcagtggacgcgctccgccgaggagctgttcaagggaggcgcttacgagccgaaaggatggagaccatgccgacccagccgagccagctgactttgtcgagcgtctggattgacgacaagccgaagccaatgacggtgacgatggcgacccagccggcggtgcagagcgcatggagcgagacggcgttgagcgagattgagagcgagagcaggcccgagccagcgagggcggcgcagtaaatgaagaacatgacgccaaagatctctcggccgatccggccgccaatgacctggccgacctcggacgggccccagatctcggggtggttgcgcttgctctggccgacgacccagtcggaccctaggtgttggcgagggagcaaaggggccgcggcagggtcagctgtggtcagaggactcggacgcgtcgggctcaggcacgcacaggtcgtcatgcaggcgacggcgacgaggatgaccatgcctggcaagagtccgagggcctggaagaccgaggggatcgccaggacgccgaggccgatctctgatggagggagaagcgcacgcgcgcatgtcagtctcgtttgctgccgcgcgcgtagacaggttgatagggccttgtggcggacgcacgcgtcttcatgagcaggacagaggtgccgaaccagccgagctgtagagtggcggggggatgaagcgaatgtcaggctcggcaagcactgagagcatggagctacgaaagactgacgttacggtacgagggcccgtcggcgctgaccacgccccagacggcgtcatgaatctcgccctccttgagctcgatgccgccctcgctcttgatctttggatgaacgaccatctggtgctcgacgtcgacgtcgaccgtggtggaagaggacgactgcatggcgggagagagttgctgggcggcgggcaggctgaggtcgtgtgcgggcgtcgtgtcgacgtgcgagagcaaaactctgcgacctggagaaaagagagatgaaggaggacgcggaaggggagagggcgaagctgaggaggcggagagggagggaggaggtggtggggaaagggggagcttcgttcagttggttcgtccgaaggggagcggcgacgacgtttgttgggcagcatgcggcccgacgccccgtcgtcagcctccggccaaaagcaggccgcaagtctgcgggtgtgtgcagagcaggaggaggcggcaaagcactaccgggtcgacgatcgaggccggccggacgccgagcttcgaggaagaggcggggcgtcccaaaggagcaaggggcctctgaaatcgagtctgagtggccgagcctggcgcttggaggacaaagcctggcgaggggcggccgcgatgggccgcggaaaacggcgtcgtcggtggcggcgggttggagcgcagcgacgccgagacaacctcgtcgcgggcccagttccgctgccggcgacagcgagaaggtgggcgtgcggtagtacatccgaggcagagcaaggggagagggcgggtggggcgagcgggcgcgacattcaatcttgtcgcggcagcaagcagagcagtgcttcagcaggaaggcggcggctgcctgcgagcccgcaagcgatgaatcgtgcgcggttcgtgacgaccgccgccaagccggctcgtacgcctgagccggcggaggctcgtcaggcacgtatggcaccggccttctccgccagcggcctcgaaaggaagcccgtgggagactggagtgcacgcggccgcaatacgttcgttacaggcctggaaggcgacagcacggccttgaagcctaagggcacgacgcgtggaagctgcgagcaggcatttctcgacgaggccgcggtattgagcaacaaacacgaggtgaggttgtccttgcggacctgtcagaaagagacacgtcgcgtcagagtcgttaccaagcagacgcgacaagaggggctacgaagccagccgacgaagacgagcaactcaccagtagggcagaccgagcgagcgtcgactgaccggccgcaacaccacggcgcactccgactgattcgcctcctcgaatacaatgttcgccgggtcgagggcagggcgcgcgatcggacgactcgcctacgcccttcgtcggacgtaggtcgcccagagccggccgacgggcaggagaaaggccttggcgaaaggcggcgcgaggtagacggaagcggcgatccgggcagggaggagggcctgagggcaggtcgagggaaacaaagcgttcgcagagaggagttggcagaggcgcgtcaggaagagacggacgcaacggaaatggcagcgcacaagaaagcaaggacgaacctttgtgagcatgtaggcggcgacagcgttggcgacatcgccagcgaggtccttgctcgagacaggcagagcgccgacggcctgcgttgtcgttgtcgtcgttgtcgtcgaggccgccacgtcgccggcagtcgccaggagcccctcttgtccctgaccagcgcccttgaccgttttcgggaagccaaagaagccgtagcgtcggccgacccgctcggccttacgctcgccctcttcgagccagcgctcgaccgtcctggcctctgctccgccgacggcccgctcggcggcgatcatccggtcgacgacggcctggccgccgccgaccgagcggaggccgtagaagaggccgacgaccgggagaatcgcggtgagctcgtgcaggacgccgaacgagacgacgagcgtcggcagcgggaccgaggggtggaggacgtgcaggcgctgaagggccgggaagcgagcgagcagcttggactggatcggcgaggaggaggaggccacggccggccgcgaaaggggcgacggagaaggaggaggagtggccgacatcgacgggaccctttcgaacgactgaggacagctcttgagtgacgatgctgaagaccgcctgctgagtacgtccgatgagctggatctgcccttgctgctgtcgatgggagtggaccggtctggcgagggtcgacgtcgagcggtcaacacgtcacgtctcgctcgctgcgagctgccgttcgtcgctttgcctacagacgaccacccacagcaccctagtcgacctccgtttgcactagttggcctctcctgcacggccaagtgactctcctattcgaccatgtccatcagtagggagagcaaaaagatcttgattgagtgtgagcccgtctgccgtcctcctcccggcgcacggcgtctgccgcagccgacacccggagctgaccagcttgtccctaccctcagcgtcggtttacctggcgacgtcggtgagcagtctgaccagagcgtcatctgaagcagctccgtcggctgacaaccccctcgcgttccttcgcagctcctcgcactctgttcgtgccctgagccgctctccgctggccgctggccgcgacacgtgccgccgtactcatgagcctccgtccacctctctgcccttcgcagatgcctcgtacaagctcatggagcaggtctcgcccggctcggccgaacgtcgcaagtcgtcggccaagggcaaggaggccctcgcccggcttcagtcgtcgacggcggccaagctcgtcggtgtcgagctgaacgagcacgaggaggccctcttgaacgaggtcatcagcccagaggacatcgaggttggcttcggcggtgcgtcgccagcccctgctacagctagtgcatccgatcgtccggctgacaggcgtcgatccgaccggaccgagcagatatcggcggcctcgagcctatcatcgagcagctgcgcgagacgctcacgctcctgctctaccctcaactctttgcctcgcactcgggcggcctgctcgcggcgcccaagggcatcctcctctatggcccgccagggtgcggcaagacgatgctggccaaggcgctcgcgcgcgagagtggcgcaaccttcgtgcgtggctgctgctcctcatgtgcgagaagacagcgctgacgtggccgtcgcggccttcgctgcagatcaacgtcccgttatcgagcctggcgagcaagtggtacggcgagtcgaacaagctcatcgccggcctctttacgctggctaagaagctccagccgacgatcgtgcgtccttcagtcgatcgcaaagccttctccccgcacctcagttgacatgctccttcctcaattcttcgtccagatcttcgttgacgagatcgacgcgctcttgcgggatcgctcgagcgatagtcacgaggtgacgtcgacgatcaaggccgagtttctgacgtttgtctccttgcccagcagtgccagggttgccttccctcggatgctgatctgctcgcgtctcattcgacagactctgggacggcctgacgactggcgagaaaaatcagatcctggtcctcggggcgacaaacaggccgaacgagtgcgtcactgggcgtgccgcttcttgaccacgctcgtactgatgcgccaatcgctcgctctttgccagcatcgacgccgctttcctgcgtcggatgccgaagaagtttcaggtctcgctgccggatgccgcccagcgcgagcgcatcctctccctcgtgcgtctctgcttggcgcttgatgccgtgcgaacggccggctgacccgcttcgatccctcgcgtgcacagatgctgcgctcgacgccgctcgaccgatctctgtccatcaccgagctggccgccctgacgccgaaccggtcgcccgctgacctgcgcgagctctgtcgcgaggcggcgatgcggcccttgcgcgaggcgatgcgcaagagcggcttccggcccgaggcgcttgctgacggggctgatggcccgcgggcgccgctccagttgcgggagctgcgactcgcagacttcttcgaggagcggctgggcgagggcgacggcctcgtcagggatctcgactgaggactgagggctggcgagaggtctcggttcatgtcgatctcatgcgagcctttgcacggtcggcctcatcagcgagaatcggttttgccagcgccgatgtgcgagcgccgctgactgcaaactcgcagggtcgcagcacgtcgccatcggtggcctgctcgaggtcgtccagactacaccggatcggttcccggctctgcgctctgtcgtgatcggccaggggagcgaaatcccagtctccttctcgactcagactgaccgcaagtgcgttcgcctcggcgcactcgcacctcagctgcgctcggtcggcctcatcctccgtaaccgggcgggcctgccttggctcgccgagtaggacgcagagtagccgtcgcgtcgccgctggatgcatgccccgtctcgccgagccttctgccccgtctcgccgagccttctgccccgtctcgccgagccttctgcccgtcttcaagccagcccgtcgcccttctttgccgttcccactctcagacgtcaaccgattgataaaaggaggggataacttatagcatgatgtaggacccaaaaaggaaggaagagggtgcgcgagaaaagggtggaagggggtcttcgggagcggttgaggcgagtgtgttttcgtgatcgttatgtactctggccggccaggggagggggacgggtcgtacgggagccgtgagagagtgggagggtaaggagctggcgggggagcctgcttggtttctaagaggtaagagtgaggagggaataaaaggggcgagaacgcctagacgcggacgggcgcgcccagggtggcgacaaagtcgtgcgcgtcctcgccacccgagccggccgagtcggagccctcggacgagttcttcttggcggtgacgtcggagctggagccgcgggtggcgagctcgggccgcttctcctcctgcggggcggcgagcgagccgcgggcctcgcgctccttgagtgccttggacttgaggccaaagaaggtcatgcggccctcctgccacttgaggtagacgaggatgacagcaatcgcgacccagtacgcaatgtaccccagcacggtcccgtagttgccagtgttgttccactgccgccgggaaagaatggaggtcagcgccggtcggtagtgaaacaactaggggaggggacgcacgccgaagatagcgttgaaaatcatccagccgccgttctcaccgagctcggggtttccgtagtcgacgtgccagatcatgccgcggacatcgtacgagccggcgccgttgcccgactcggcggcgtcgcctccgactcccttcatccacgggtagatctggaggaagtagaggcccttggaccagaggccggcgccgacaaagaagaggaagcaggtcgagatgatgaggaaggtgtggagcgcaaaggccgagccaccgcggtagatgaggaagccgacgatgaggccggcaatgatgccgcagacgagggggagcggcgtcgccttagccggctgcgagatcgagacctgtaggaggagaagcttcagcgaccctgcttctcaaaagacgagtagaaaaaggtttgaacgtacaccggcgacaaagacgacagcctcaagaccctcacggaggactgtgatgaagggcagcatgaaaaggacccacttggccgagcggccctcgcgcttgtccttcttggcgagctcgaggttcttctcgtcgacgagctggacgtcggccgtcttactcttgcggaagcggccgaagagtgacttcttgggcgcgttcgggtcctgggtcgcctgcgagttgaaggcggcctggagcttgatgcgccacttggcacgcgagcggtcgaggcggctaagggcggcagagaggttgaaggtcagttggtttgcaaagcgctggcaaggaccgcagtgtgagccctcagagcgagacgcacaggaaggcgagacccatcatgaggatgaccagggaggcgatgaccgagaagattccctcccaaagggctagcgaggggtggcaggtcagtaacgccgtgcgaccgctgacccgagtctctagagacgcaccctcagagttgccccacagatcggtaaccttggtgtaccagactgcgatgaaagcggcaccaatgacgagagcgatagcaagactgtcgggaagcggaggaatgacaggtcagcaaccagccaagaggggcgcacgaggagagaagcagggacggacccagagagagcaccagaccaaatctgagaatgaggaagagcgtcgagtcagcacaaatgtcgcgagggcacgcccaaggcaagtaaggggacggaccgagatgcgcatgcgcttgatcatggccttggacttgcgcgagatctcctcctcatcggtcgactggaagtcggagccggagacgagctgctcgacaaacgagaggaggaccgagatgataatgccggcctcctgttgagggtgagggggtggggggagacgggtcagtactagcaagagaaagcagggaggaaggaaggacggacgatcgtctctcggactgtggttggtcggaagcgggggggggcgggtcagaatttttcgtaatcagatcgagcgcaagcttgcgggcgatcccggcaaggagggcgtttcgaactcaagaaagcgggacgcacagatgatgaagaagatggggacagagaagatgtcctgagtcatgctgggcgacttttgagagctggcgaagtgatcgtgcgatcatgaggagggcagatcggccagggggcgacggagcggggagagggcgacaggcgaggcaagcgacaacaacgggcagccgatggaggatcgaacgggaggaagagacagtcagctcgagcgcatgctggaggagaaggaagaactggtcgggtatgaaagaggcgcacctctgctcgcagaaagcgctcaagatcgggaagagagagaagggaggtggttgagagagaggggaagaaggcaaacgaggcttttcgccctcttccgccctccgtcctctcctccctccgccagatctgatttgggcctgattaccggcctaacctcgaccctgcaggttcgggtaagaaaaaaagaaagtgtgcaggaatagatcccatcagcagggttcgatcgctctgtcggccggtcgagagcgaaagggcccggcctgcgcggggacaagctcgcgttgggccaaacagcaggcgcctgcctgcatgcacgaaaatgggacctgctgctgctgctgctgctgcttctgtcaaccatgcaattcatttcagggcgcgcgaggagtcgtagcgagatcgaaccccttctcttgctctgctcgccggacgaccgggaggaggggacgaaggaggacccatccgcccgctggggggcagtctcgtttggtccttcgtgaggcaatcaaagggcccgctgcgcttgtgaaggtcggcgagccgggtgccttcgggcgaagctgccctttgctcggcccacttcgccctagaggacgacggccccggggtcgtgagcccaccgccccgcaagccatctaagccgcagctccggcttagaggagacgaaagcagcagagaaggcacaaaaggaaagggcggctggcggcggtcgcggtcgagcggcaggggggagagcgacgagctgctctccgggcgcgagcagccgacggtcggccgaccggtgcgagatggtcgacaatggcacacagcgggcgagcgagatcgcgctggtagcggacagagagctcggcgtcagcatagccagcgaagatggtgcaggtggtcgatgaggagggttgtctcccgagctggcctgccggtgggggctcttgctgctcttcgcttgcagcagcagcaccagcaacgacaacgacgacctctccctccgactgcacccgacgatggacgcctccttcacgacatcgtcctactttcaaacgcaggacccgccccggaacctcgccgacgagcaggcccggacggtcgccttcctccagcgggcaaaggcccagcgcaagcgggtcgccctcgttacggtgagctccgacggcgagcttgcgatggtctcttcccgtcggccggcggcggtgccatccttcgctgacgactctcttccgatgatgatgcgctcgtttgcagagcggtgggacgagcgtgcccttagagaagaacatgtgaggtcgagctgcggtcgtcggccgagctgacccgggccaccagaggctcgctcaccctcgtcgctcgagctgctcgctgacgcttgtctctcggacccggccgaactcatcgtcgccgtctcgcagggtccgctttctcgataacttctcggccggtacgtcttctcctgtcctgaccagtcaaagacgcgtctggtcgaccgctgagcccagctgcccagcgctctccatctcgctccaggcacccgaggggcgacgtcagcagagtactttctcgccgagggctacgccgtcatcttcctccaccggcagcactcgctccttcccttctcgcgccactactcgcactcgacccggccgttcctcgaccttcttcgggtcgagccggcgacggcggacccggccaagcccgcgagcatcaccgtcgacccggcagagatcgcacggatgctgcccatcctccagcgccatcacgacgcccactcgcaaggggcgttgctgatggtgccgtacgtgacagtcaacgagtatctctggctgctgagggcgatcagcgaggtcatgggcggcgaccgtggggtcggccgcgaaggcctcttctatctcgcctgcgccgtgtccgacttcttcctcccgaccgacaagatggtgcgtcgtctccacccgcgcgctcgatatctatctcagcggtcgggctgactcgccatcctcgcaggctgagcacaagattcagtcgggtccgccagccggcgccgctgacggcccggtcgaggacggccggctgacgctcgtcatggaaggcgtgccgaagatcctgaagccgctcgtcaacgagtggacaaaggagagctacgtcgtctcgttcaaggtgcgactcaagcaagctcgcgctctacaaccgaacgctgacctcgcaccgttcgcttaccccgcagctcgagaccgacccagagctgctgctgcccaaggcccggggtgcgctcgacaagtacggccaccagctcgtcatcggtaacgacctccaccggcgcaagttcgaggtcgtctttgtcgagccgacgacaggcagcggcggtgacggctacaaggaggcctgggtgcggttgccagagggcgcggtcgagcgcggggtcgagattgaggagacaattgttcgcgagctcgttgctcgccatggtcgttggattgcggacaaggacaagcgatagaatggcatcacgaggtcgactggcgagactcgagctgaaggagcgtcgttgagaaaagaagggtaccggcgaggatcgagaaataacagcgctgtgctgcgcgtcagccagccctcctgttgacagccatctcctctggctctcatgccgccctcacacctggcccgggcgcgctaaataggcatgctctagccagcctgacctcgggtcaaccgctcgacgatgcttctggccggcgacgtcgcgcctgcctctcctgagggggaacctgcctgccaaggcacgaccgacccctgtcgcccgcctcgctgacggtgtgagcctcctattagcccgcctcctcacccctgacgaccacctgctgcccttctccctcgagcagctcggtatatccgacggtcgactcacgtccctcctcctctggtgagttcagcttcgcgggccggcaggcgttcgctgccacgcttcgctgcctcgccagggacaggggctcgagcttggagggctgccagacgactggtcgggcagccgctgccctcgctggccggtccagcctcaaggcgactcccagagggacttctcgcaatcgagcaggagctaccctacgagatgctgagccgtcgagaacacatgctcgcacgttggccggaaggatcgtcctccttcgattgaaaggggctcgtcgactgacccctcaagctccttcccttccccagcctgccagtctgctcgcctgaccctcgtccctccccagcctcactcgtgcgcccaccatggcgtttgcatcaaatctctcggtcgtgccctcccgctcgcgccgcctcacccccatcaccgagagcccgcccgactcgcccgacgctctcgagagctcgttgcctgcctcccgccgcctctcgctccgctcgcttcacaagacgctccagcggcggactcggacgacgtctgccacctcttcgacctcgacgcgcgagatggccgccgctgagaatcccgtctggcacgttccgcgcaagccggcgcctgtggccgatgcagcgacgccagacgacacggcgcagtctgccctcccgcgcaacagcggcaccttcggacccgtcgacatcagcccaacgggcgacgagcccggcctcgtgcagctctcgccgacacacgagatcagcagcgtgcccgccctctcgccgtcatcagtcgggtcgccggtcgacggcttcttcgccgacgacgtaccgtcccgtctctctggcacttttggtccgcctccagcatcgcaggacacgtcggagctgccgccagccggtccaaactttgcctgccgtctcccgctcacagaggctgaggcatctcagccgtcctcgctcggtctgccggtcgttgcactgcccaagctaaaggcctcaccgtcggcggcgtcgcttttctacacgccaaccgggtcaacggtttcgttgcgcctccgagacgtcggcggcgagctcgtcgagaacattgcgccggagactcctcatgacacggccgaggacggcggttggccacccgccgagcctttgcaaccgctgcaggccaactctccagctccggcttcgcagtacgtctcagcgcactctaccgtcgcgctttagccacccgatttgacttgtccgtctgtcccctctcactgcagcagtcccgaccggcgcatctcgctcgacctcctcacgacccacacggctctcgtcgcgctcgctcagaagctctcggacgaggcagccgcgctcgagcacacgagagccggactcgattcggtccggcgcagtctcgacatcgagctcgagggcctcattggacgcttcccgctcgctcagtcggagcccaacggcagcgctcggccttctcggcactcggtcggcccgactcctgtcacaactagcgactgctcaccgctgagctttgcgaaggatgccctgacaacgacgagtgccgtgtcgtcgaatggaccgccgagctggtcgaccgtctcgcctgcgcggtcgacgcccggcctccagatgaagagcatgcccgtcgacgaccagccgccgacgctggcgtggctcggccaatcggcagagggcacactcctcgcgtcccaagcgtcgctgcccgtcaggatcgaagcgccgtcggccgaggcacggcctggccggcgcgaacgacggcaatcgtggatccggcggctcttcgcctagcgtgctgctcgttcgtactcctcccttctctttgtgcctcgcgcaacctggacctcttcctacggaactcagcgccacctcgccagacctccgctgacgatactctagtgcttccttcggctggcccgatccgtatcctcgcgtatgaccattctctctccccctgtagcctcctgcccctgatgatgatgacggaccccgaccgtcagcagagacattgatacaattcgcgagcgatacagaagccgcggcacatcaaaccctcgttcgacgccaggcccgaagcgcaaacaggagccagacgaccgctcctcctcccgcggccgtgatgacgccgccaagccagcgcaggacgcgcttctggtgctcctcgcgctgccaggcctcggcgtagccgacgtcggcccggaaggtgaccatgtggtagagcgtgctccagcgccggacaatgccgcccgggtatggcgaggctgctgtcggcgtcttggccgaggacgtcttggcgagcgaggaggcgatctgaggcggggttgggggtggaaagagggtcgagaggaggacgtcgagccggcgccgaaggagatggaggggcgacaggacgtgcgacttcatttcgtcgctggaataagggaagggtgcggggggagggcgaggaaatcagcagtcacgcgcagcgtttgtatcagaccggacggactagttgttcattgccagacgctggatcgcctcaaggtcggccttgcgctcggtcgcgtactctgcgagcgcccgctcgagatcggcgtccgagccttccgtggcggtgatgccgtgcttggcaaagaggtgctggagcacgcggacgtcctcgagcccgcagttgaggccctggccgtagaaggggactaggggcgggtaaggggtgtcaaacgtcagccccttcgcgctcctggctggcgaagagccgacaaagcgactgacccatcgcgtgcgccgcgtcgccaagaaggatgccgcggccttgcgggtaagcgaccgggtcgaccgagacttgcgtcaggccgccccgccggcccttcatgaagtcgttcacaacgtcgtcttcgcccatgagctcgatgaccgacgtcgggtgctcggccgtcgagcggaaggagcgccggaagaaagcccgggccttgtcggccgtgtcgagggcggcgatcgagtcggccggggcataaaggctggcgagaggcgtagaagcgcatcagtcgcggcagaccaagactcgcttgacggcagagggacgcacgtcatggtgaacgacttgtcctggaggccgagcgagggcggagagggtcaggattatcttactggccgcatgccagcaaagtggccgtaccttattcggcagagctatcagcatgaactcttgccgcggccagatgtgcagatgccggggtgaaatagcaaagtcgggctcgccgtcgccgtccgtctttggcgggaggtgcagctcgatccagacgtggggaatctgcttctgctcaaacgtcgtcctgggagagggtcgcagcaaggggacatcagccgcgtgtgtcgcgaaggagaagggcgagcgaagggacactgacggctgcgccatgagcatcgacgcccggaccttcgaccacgtcccgtcggccgcgacgcaaaggctccagctctcgcctccctccccttcgtgcggctccccgtaggcgcccttctcaccctcgacaaacgccttgcgcttcgcccagtcgacgcgggcaatcttgcgtgagaagtggacgcggacgtttgggtgggcctcggcgcgcgagaggagggcggcagagagggcggcgcgtgagatcgagttaattgacgacttgtgaagcgggtcgtacagctggggcgaggcgctgggaggcagcgaggaagggcgcgatggtcagttggctggctccagggaccggcccagctcgaaggggtcggagagctcgctcgcccgacgcacgagttgtcaaacccccagaccatacgaccttccatcggtagggccatgtcaaggaattcgtcaactgccagagggaagaggcgaatgagggtttgactaggccacgcgagagactacggtcggctgggctgggctggctgcgggtccaacccttcttgccgccaagcttgagctcgcagcgacgcaccaagatcaggctcaaccgccttgagtgcgcccaggccccgagcgctgatggcgaggttgacactccggacctcctccttgacggtcctcgggtctggggcgagcgttgccatctccctcggtcagccaagggtagcgatcgggacgagctgcgagcggcagactgaccgggccgaccctcccagatcgagacttcccagccttggtgggcgagggccagagccgtcaagcagccgacggggccggcgccggcgatgagagctgtacgagggctcatgcgagaagaggggcggagaaggagtagatggatgttggaaggacatcgaaaggtcaaacccgccctcgtcacctatccttgactgtcgggcgggctcgtacgcatcgggccaacgccacctcgtgcactcaagttttctcttcccttttcaatttcaaggctgagctctctgtggcaggcgacctggtggtcatatgccagccggctcgtctggacgtctcagccatgctcacagcctcggctcaaagccaggactggcgcgcggttggggtgagagagcaggagacaagtgtccacccaagatcggctcgtacaaaatgatccagcgagcgaaacggtggattgtcaagcggatcacacgagcggggagtctgggcgttaagccaagagcaaagggttacgacgggcgggacaatgggcgggacgacgcgatgggccgagcgagtcgaagacgggacggcctccgaatagtttacaaagcgatgctgggcctagaggcggcaatttgagtggtccctcgagagatcgatgacggttgtgagagggctgtgagagagagccagcagaagcacgcaggctgacgacgaggtcagcacgggcagcttcatcggatcataagtcgcttcaggcggctcaccgagcggtcgtccgtcttctccggaccggcgggcaagttactgggtagatctgactgatgcagcaagacaagttgagtcagccttcaaaccttgggccaaggagagagaggagagcagaccgacgcaccggatctcagggcatagttgagcaaacgacagcggactgcttcacgagcaccctcctcccccatcacctcctcctcccttccctcctgtcttctcgctctcaccctcgctccccttctcattacccttcacgcccagccatgggaccggcacttgacccggatctcatccacggctcggagcccgaacgcgaggccgagcggcctcgcaagcgggcgcgacggacggccaggagggaggcccggcagcaggctgccgacgacagctcagccgccagcacgtcgacccttacgagcgggctcgacgactcggacgacatccaagagatcggctcgagctctcgaacgagcgttcagcaagggacgacgagcgcctactttgacttggggcgaagacaagggtgcgtcgcttcagttgctctgcgctgggcctcctcgtcgagccgcccctgacggacacttcctgtcgccctccttgcctcagcggcctcggtcgatcctgctccgtcgacagctcgtccagcgatctcccgtgccagctcatcctactcggccgtcttccgcgctccgcgtatccccaaggcagacccagcggcggccaaggacttcatctacgctcatccgccgcggtcgtcgccaccgaaggcggcgcctgtcgacgcccgcgagccgagcttcgacgaccctttcggcgagcccttcgacgccgccccgacacaatcgtatgacaactcagagctccagcgggtcaagcagtgtccgctctgcatggaggaatggagtcggtcgcgcaagctgtcgaaggccaagtgcgtgcatccgcgcgcagctccctcccgctcgtccgacattggccgcgcctcagctgacagtgagcgtcttcgcctgcgtttgcagagctacacggtcgcatgcaagctgtagatatgtccatctctccggtcgtccgggcgatccgcgatcggctcaacgagaagcggccgggcttctcgcgggcgtcgtcgacggcgtcggggttgaagcgctcgacatctgtggcgaggcgatccacaagatgagcgaccagttcttctcttcgggcgtcgtgcgtcctgttgtattcagacgcaaagctcccgttcagcttcaggctgacctcctgcgccgcccgccaggccctcgccgagatgttcgacctcgcctcgatcccctttgccgacaggatgatcctcgagctcggttccggagctggtctcccgtcgctcctggcgtcgaccgcggccgagccgcccaagagcgtgcccctgaccgactaccccgaccggagcatcaccgacattctcgcggccaacgtcgcgcgcaacctcccagcggctacggccggttgcgaggtcgcctggctcggctttgagtcgatgttttgaagtttagataagcagtgtcatatcgtcaaccaaaaagagagggggtccgtgtgcacccacccgctttacttacctcgtatacgagaacgccttcctcgcgaacaggcacagaaagaggaaggctgcgaaggaggcccacactatgattgacactcatcgacgtgaccgctccacaagttcttcagcctcaactgctgcttacaagtctgcaactgtcaaccgggctatgaccgcgcaaaggcagggcgcgtgcgatgatgcagtccctagcactggttgctgattccaacatgacatcgactagggcagacagggcgagggacaactagaagagaagggcgtcatcttcgtgaatggagacggaagcgggtgcgggaaaggagtgtgaaggcaaccgtgcgaccggctgttgtgccggcgctcacggccgcttgacgtcgccgacgacggtgccctgggcgccggtcagcgactccttgccgccctgggcaagctcgcgcagggcgtcggtaatctcagcctcgtcggccttgctccgggcggcgtcggcgacagccgtgccggtcgcctcggtcttctggacggcttcaccggtcgttgctggaaggtgagcttggacaaagccggcggccgaggagaggagcgaggacgcctgggtgacgacgcccgggtgcgaggcggtcgccgtgctctcgtcgagctggtgggtcaggttcgagagcgtctcctaaggaatcaagaggagcgagacaaggtcagcacacgcccacgttctgctgccggggaggtccacgcacggtgacgttctgggcgagaccagcgaggtaggtctgggccgactcgagattggcgccaccctccttggcggcagcgtccgtcttctggctagcctcggtggcaaagttgtcggcagccttggcggtctggtcctacaaagcgtccaagcaggaggagacgagagacagaatgtcagccggctgactgcttccggaaaagagagatggcgcgcacctttgcgtcggcggcgacgccgcgctgcttggcgatctcggcatcagcacgagccttcgcggcctcgtaggtctctccagcctgtagcagaaaaagaagcagcagtccgcatctgagcagcagacggcagcgacacagcgcgagccgaataatggcgcaccttctggacgacctcaccggcgagggccttgcccttctcaatgtagggcgcggcggcgtcctgggccgacttgatgtagggcgcagcagtctgtcgaaggtcgcactcaatcagctatcgctcaggccgagggacgggagtgagacgcacctcctgggccttggccaggatgtcgttgcctccgccggcgatcgagtcgagggcggcggatggcgcgggcgccgaagacgacgacgaggtcgacttgaaggtcgacgaagcgggcgtcggggttgacggggcgaaggtcgagaccgagggggaggccgttgtcgaggcagagggagcagcggccgccggctttgacgacggcgtcgactcgtctgactcggtcggtatgttctcgagcttgagcgactcgggcagcggcttgggcgccgggtggtcgacgttgtcggcgaggtgagggttgaaagacattgcgaggggtaaaattgggtgcgaggagggaaggaggggggcgggaagaagggtcggtgttcggagggagagagagggaagtgaagcgagggccgagatggctctgctgttgggccaagcgggccgaccgtgaccggtggacggcacgtcatcgaccctgatgcctccgtccgactaaccctgagaagggcgcagtattatcgcggcatcgaggtaactatcaccagtcatgaaaggtcgtgtacgaggagcttgagagtgaagggggtgcgagggcgagggcggcgtgcagggaggctgcgatgggcctgcttcgagctgcgcctcgttgcctgctccctccgacctgcgcctcgttgcctgctccctccgacaccctctcgacctcccccttctcgctatgcccatcggtccgacctcgacatcagcgccaaagaagaaggcgccgcttgacggctgggatgcgcctcagcggccgaagaaggcgaccgagctcgaggttcgagccgagctcaagcagatggaggggcaggaccgcgtcctagggcggacgagcgacgacagcaagcaggctgagggcaaaatggcgatcaagccttagagagacgtgcgttacctgccatgttttgactctcgccgcagctgacccttctgagctctacaggtatcccaagacgacaccgttgtcctgcaggcctcggggcctgcgtcgacgccgcaccatcagaccgccctgagttgtctggtccgatccgcactctcccgacgcgacatcaaagctcggatttcctacgaggccgagccgcgcaaggatcaaaggcgacatcggcatctgcctaggatcagatcggcgggaggacctcggcgagcctgcgatgggggtaagcgagatggtcagcgtttcgcgggcgacaggggaggatgacatgacaagtgtgcgccgcaccaagccttgaggtgctcgagctcttggggcgagctgccgtgaccgagaccggcgtacgactcgaagcggacgcccctgccggcgacgccctgggcgcgggggaggccgaggtcctcgacgagggcgtcggtcgaccgcttgccgactgggatgggtgagtatggtcagcatttggttcaagcgcaagcgcgaacagccttggaagtcgtacgcacaggtgtgcgcgacaacctggtccgccttgccgtggccccagaagagtggggtctcggtcgcccgcgtgttgagggtctccttgatggtcgtgcggaggggcagccagccagacagagctgtcatgaagtgagaggggcgagcggtcgggcacagttagcacctttcactgcaacgacgagtcgttcttcaggtctgactgaccgacgacgccggcgaggttgcgctcgacctccttctcacgaccctcggtgcccttcgtgaggccggccaggagcgcaacggcacagccctgcgagaagccgccgatgacgacccgctttgggtcgaggtcgagcgagtgctgggcgaccaacgcctggatcgcgttggccgaggcgacgagacccttgcggtcctcgtgggccgggtccgtcaacttgtccagcgacgagaggtcgaaccagccctatcgaaaacgtttccagtcagccatcagcggacgaggacgagcatctcgtagcgccaggcagcttacaggcatggccatgcctccgttcagagtgatggggatctcgggctgccaaagtgtccaagtatcagtcggtcgatgagctccagctgggctgcagctgaggagggcgacatgcaagactcacagcattgggcaagatccacttgacctgtttggcatacgcaggacagaagcggagcgatcagtcagagccattccttcgaccttgctttcctcaagaggacgcgacggacgtgcgggagagccgagctcagcatccgggcgaccggaagccagccagcgccagagtcgccgaggccgtgggctgcaggtaggcatccttccggtcagaacggaagggctctgcaaatgagacgtgagctccttaccgaagatgacggtcgccgtgtgcttggccttgggcgccacagtcaggaagctcagaggggccatcctgcttgaggtgggcggggggaaaaggggcgagaggagcggcgacaggaagcttgttgcgcggggcgaggcgggcgaccgggcgagaaggatgaggtaggtaagcgaggcagcggcaagtaggaagccgacgacgagcgttctgctgataggccgtatggtgggagagcaaggatccaaggggaggcagcaggagggcgtcgggaggcagaggcgggcgggtctgcaggacagactcgaggacgagctcgaagcgcgtcgcctccctccgagcttcatctcgaccgggctcacagcattgccttcgcctccctaagagagcccgccgggatgtcgtccgagacgtactacctgggtgcgttctctgctatccctctcgcacgagagaggccagggagctgacgcctgaagctcggccatcggctccgccagaccactcgctctatcacgacccggccttcgcgccgtcggatctggcctcgtcgatcctcgccgggacgacttatcatccaccgtcgtcgggctcacaggtcgtagtcccaggtgccggtgtcgagaagaccaagggcaaggagctcgcaaaggagggcgagagcaaaggcaagggcgacgccggcctggccatcgcccggctcagcttcagcatcgaggaggtcacacgattgctcaaggccgaggtccgttcgccctgcttatcgagtcttgtcgaggcttgctgctgaccggcgaattcgctcgggtcttcatagatcacccagaaccacacggcgctgctgctccaggcgtcgtcgacgacggtgctctcgcagtcgctcctctcggtccagcacggcctctcttctctctcgctctctctcactcggctctcgagcaagatcacgactcctcatcgatcgctccaagatcatgtccggcatctgtcggagctccagcgagcgtcagacctcctcaggcgagcaggccgcttcctcggcgtcgcccgccggctcgagattcagatgctcgagatggaggacgacggcactgcagaggctgcgcccggtatcggcggcgaccgacgagtcagtctcgctcagctcggtcggcgcgagagcgagctcggtggcgcggcgaacatcacaccctttggcgaggaggggcggcgggagcgaggcatgaaccgcgcagcgctcagcatcgcggagctcggtcagtcttcgctcctgtcggtctcccttgaccgactcgcaggctgacgatacattttgcagacgcactcctctctatgccgtcgagtggggcggcgcctcaacaggacggtactctctcgacacccagctcatcgtcggccaagccaccgccagtacctctcgtcgacctcaacctcgtcgtgaggtacctcccacggctgaacgacctgaaggagcatctaacggagcggatggaagcgcaaatctttgagggcttgtcaacactcgttcgtctacttcgtcttgcgaccagtcgtcctctggtctcgagactgacgctaccttcctttcacccgggcctacgctcgagcagaaccaacaggtccttgcttcggcgctgcagacggccttcaatcttggcatgctgcccgagctcgtcaagacgctgcttggcgatctgactgaagcggtggaggggcgcatccgccggacgttcgacctggcgtcgctcgcacgagacgccggtctcaaaggtgcgctggacctcttcctcatgctgtgctgaggcttgctctaaccatctcgtctcctcaaagaccctccgccatcgaccaccagctcgtacaagagccggagcgcgcaaccctcggccaacgtgcagcagcagtgggcgaacgcgctctggagcaggatcgacggcttgatcgacgatatggcctcttgctgcgtcaaagtgcggccaaccttgttgacagtgctgtgtcgaacctgcccctgctgacgcctttgacctcgctcgatacaggtctacacgctcgagaaggtgctgcgagtcaagaaggaccccgggagcgggatggctttcctcgacgaggccatgaaagtggatcctgtcagatgccgctcaccgcttccgacacgctgaccccggtccactttgccctcaggtcctcgacaataagccaagcttcatcttttggacgacgctcgcaaagacgctcgagcgcgagtccaaggacgcctctcgcagtaagcctatgcttcacccattgtttgacgtatggggccgctgagctgattggacctcttcgatccctctcagcatcatccttcatccaacagacgctgagcatgggctatccgaaattgctgcggacgttccaccagttttttgccaagatcagcgtccagaccgacacggtctatacgcgcgaccagcagtcgtgggtcttcaacacagctcggtcctcgagctagtacgcgaatgtgctgaccaggagcctgcgttcagacccgagacggttctcatccttcggtcactcaccccctttgagacgctctacctctctcgctcatcgtcgcgtctgaccgaggtcgtcaacacggccacctcgggcggcagtcgtaatccgccaggcgcgaccgaaggcgtcactgtcgctcgcatcgcgctgaacgagctcgactctggccgcttcgaccctctgctcctgcggagcgttgctcgtggcgtcggttcctcgctcgagacctttgcgactcggctcgagaacctggtgagtgaccgatcgtgcggtctagacgagggtgccagtggcgctgactgaccgttcgtcgccgagcagatcgccaaggatggagccgcctattttgtcaatggcacggtcgccaacagcgcgcaggcactcaacgcccagatcacgagcgccctctggcactgccactcgctcatgacgaaagccgaggccgagtacaacgagcgcatcatgtcgatcctccgcgggccgatagaggtccgtcccctccctgcagcctagcagaccttgagctgatgaactcgcccttcgccaccacagcgtctcgccaagatctacgcgacgcacacgacggccctcctgacggcgatcaagcgagactttagcaacatcatcggccgcctccacaaggtcgactttagcaagctcaatgatccagtcatgggcggcacgagcgcctacatgacgacgctaatggagcgcctgacctttgtccgggtcgagatcttgacgccttacaatgtcgggaagttgaagaaggactggtacgtctcgccgttcgaagcagaagctgcccagccgatctgactcgatgatttctcctccgctcggcatcaggacgctggatatcgtccggcacatcctgcagacttttgtccttcacgcgtcgatcgtctcaccgctcggcgaggcgggcaagctcaagctgacgagcgacatgaccgagctcgagttttcgctcgggacgttcctccttgtcgccagtggcaacgaccggaagaatgcgctcaaactccaagacgtcggcgaggagtacctgacgctgcgagccttccggtcagtgagagcgtcactctctgcctgttgatcgttcgaactgacctccgccgtcgatttccctcgccgcgaccaggccgatgcttttcctcgagacgtcgctccttggcaatccggaatacacggtccacctgccgccgctcgccgtcctgcaccacattctcgtccggtcgccgctgccgctgccgcaccagctacacaactggagcgagatcgagtacgtgctatgggtcgaggcccactctgagcccgagtgctggacgctcgtcgagaagggcgtcattcagtgccgcaaggagcggcgcgagggcgcagaagacgtctttgagctgacggaggaggtcctcgacgaggcccgggccagcctagagtacgacagcagcgactacatctcttgatgcgcgctgtcaaacgagcgacgatgccgagttcagaggaggtcgcaaacatgacgagtcaaccggtagccagactgccgagcacgatccccgcctctgctgagatatcccagccgacctcgcgtagccagcccatgctctcctctccctctgggcgggcctgctcgtcctccttgacgagagtcgccgtcagtccagcccagactgcgtccgggtcgatccggccgagggccagcatgagcagccgtgcttgccgccgaagccgctcgtggacggcctgatcgatgaacgtccgggcgagcagcaggatctgccagcgtatttgagacgtgacggggacgccagagacgacgccggccaaggttgcgagcgccgaggcatagagccgatgcgtggtcgagaagggcgatgccgccgagccgtagagagggttgcccgccgaaggctgcgggttgttgcgcaggataagggacgccttccggtcggcgtcgatctggcgtctgagcagccgctcgatcagcggccagccttcgtcgcgcacgcggccggcgacaaagtcgccgcattcgctggaaagagactcgaggacgcgcatcccctcaaggacgacgtagggctcgctgtccgagagccgattgagaatgtagggccaggcgcgattgacgatcggcaagagctgagcctcgagaccggcggtggcgaggacgaggatggccgagcggaagagggacagaacacgcgcccgcagaaagggtgaggcgtgcgttaagaagaagagggccttggccaggatttgagcgcagatctcctgcgaacgggtcggctttggtgcagccgggccgtcggcgtctgggagcgacgagtcagcctcctcggacgcaggcggctcgttctgcgccgggtctggcccccatggctcgtgcggcgccggttcggtgggagcgggtggccgcatccggatttcttcaatgtcgtcctttgcgcgatcgtgccggtagaggaaccagtcgctcagctttgcggcatcgcgcgctggatccggccgctccgactcaaccttgaaggccgtccgatgcggcggctcgctgcgagagctagactcttcagccatgacctggaggagggcgtccaggacggcgagcagcgtgctagccaggacctcgtagccatgaaaggcatcgagcgcgtcaaagatctcgtcgacgatgtcgtggaccagaggcacaatctcggcgccaacgagctggatcattgagatgaggaccgccggcgccgcctggtcgagccgctggctcgtcaggcgctgcgagacgacttcgataacatagtctgagttgtcgaggacgaggttctgggccgacgcgtagcccgcctggtaggcgatctgggcgaccgcgctcgaggcggccgaagagacggcctgcacgggcgacgagaggtgcgaaagcaggtagtagagcgcgtgcaagagtagaggccggaagccagtcgacaggatcgaggcgctctgaacgaggagcgacaggacctggatcgtccggagcgagcgagtgacctctggcgtcgctgctagccggggcgaggccgactctggccgcgagcttggccggtcgagcagggtgctcaacgggttgaggcctttgacgtactctgtcggcatcagggcatccgcaagattttgagcaccaacctgcaggacctccggtcgatcgctcgcggggtccgggtggccagaagttccgttgtcttcgtcctcgtcttgctcaacgagcagtcggacaatcgagcgcacaaccttgcgcgtcctcttgcctgacgtaccgccgaggaccgaggccttgcccttgcccttgttcgtcgtagatgcggcggcgttggcggcggtgatgcccttgagcacggtctcggcgcaccagaggccggcgacgctgctcatgcggccgcgggctttgctgggcgaggagagcgtgacgaagtgctcgacggcgaacaagccgtcctcgccggccgcattaccgagcgccgatagcatgtcggtgaaggcccgctcggtcgcaaggtccgagacgttgttcaggcggagcagccgcggtagcccgtccgtcagcggggcggcgtccgagtgcggcgacgacgtccatgcgagctcggctcgccgacccgagctaagtccggccgtctcgcatgctccgactgtggcaaagtcgaggcagcccagcaggctgtctgcccatctctcgacgccgcctagtgggccaagaatgccctgaacgaggctcccgagttcaaagacggttgccgctgccgtgacgagccggcatgaggaaaggattttgtcgttggccgtttgggctggggaccggaggaggaagggcagagtgaagagggcgtccatgacgagttgacggaaaaccgggaggaggacgacccgaactgtagcctgtccgaggcacactctgaacgcgctgcgcgcacagcttgacacgatcggaaagtcgtcgccagcgaggacgagcaagttgccagtaaggactggccacgattcctcaaacgcccaggggttctgatgaaggagtgcgcccgacaaatcggccagcgcgcggcgcgccagtggatgctgatgccgccgcaggtggacgagcgagacgagggccggatggagctggcggagcgtgaaggtcgaccacgaaggcgtcaggacgacgaggtgggcatgcgggccaggggtcgagagcgatggggtcgtcaacgacgtgtcggctgaggacgctattgatcccaaggaggcgagcgacgaggtcgaaggcgtcggcgagggaggcgcggccgacatgttgtcgccgtcaaagacccagtcttggagatctgcgagacccgagatcccgccgccagctgcgccctgatgacccgccctcgacgcgttcgagctagaagggaacagcgagacgagcagatctcggatgatgccgagtgccaggacgacgacctcgctgcgcacacccttgccgccgcgatcggaagccgtcggcgacaccaccttgcagagtgccgacgttgcgccgggcaggatcgtggcgaggatgcgctgccgatgagtcgagagggccgttgcgaggaagtaggtctttagcagcgtcgaaagcaggccaaggggccgagcagcatctgagccggtggcggcaaagcctgtgacaggatatggcgagtgagtcagtctctgcagctgcgggaggacgagactgataggttcaagacgaaccaatgagggtagagaacgtctctccaaggatcggcaggaatgtgtcctggtcgaggaggccgcgcatgccgtcgcacagctgtcgccggccgtcgtcaagatccggatctcgcagggaggcgcaagtctgcacgacctggatccagacccgctcggtctcttcactagcgcccagagactcgcgcgacttccaccagccgacggcgagccgccagacttgctcccggacccgaacggcctcggccccttgccagtgctggacgagcgcgcggaggacgcggaggattgccagccgaagctcggccggcagtgccgtcggcgggttgcgctggaggatttgtgagaccgggaagaagacgtaggacagaagtgatggcgccgctgcctcggagtcgttcgggagcgccgccaggacctcgtagacgatgccgaggctgcggatcacccgaggcacgccctgcggcgtcagcagggagccggcgagcagctcgacgcacaccggcttcagctgtaaaggagaaggggccaggacaaagactaccgcgggtaagccgtctgcgatcgttgctacccatggccgaccaggtcaaggcgcacctggcggaacacccgctggcgctcgtcctctggtggcggcgcgaagagcgacggccggtacgagctcgacgcgcccggcaacggcaggtccggcaccggcagcggctggaagccctggggacgatgcgaggccatctctagcagagcgcaggaaaatcgaccgtctgtagagaagccaggcagaaggagaaggcgagcggtcgagcaaacggagtcgtgacggttcgaaggtcggtacagacgcgacgaacgaccagagctgccgacgagtgagggcggcgaggaggggggccgtctctggatcgtccgactgccatctcgttcttcatccaaggttgacgacagtatggcagccaagtcgcccatcacctgccacggtcagtcctcacgtcgggtcgccaccctgcctgctcggtgcttatcgtgggctcacaagcgctgcgcctcgcccgacgaccgtagtcctcgactcgacactcggcaagcccgccgccgacgtctctgtccttctcgagcatctgtctaccgacggaggctttgtcgagctcgccagagggtacgtcgttgccatcgccagcgcagcgtgacctctgagagtctcgacctgatggagactgacccccacgcgccctccatctcgccctcagctcgacagactccgacggccgggcttcgagcctgcttcagccctcggcaccacctctatcggcaggcgtctacaagatgaccttcgagacgggcgcctactttgcgagccgcaacatcccgaccttctaccctcgggtcgaggtcggttgcctgtcctacgagccgaacgtcgctctgccgcgcagcacgcaagagcaggctgagctgaccgtcctcctctacctgggccccttgtgccctgctcgacagatccttttcaactactcgacgtcgagcgagcactatcacgtgccgctcctcctcagcccgcacagttatacgacgtaccgcggcagctaatgcggcctgattgatttagatctgttgcttgcccaacggccggccgcgggtccagccgaagtctcgctaggggaggacatgcgaggacgtctattctggaggtagacggtcgaggcagcgacgcttcgtctccagtatctatcgaaggagaggtcaccctctggctggtcggtcgccagtgcgaatgcaagacgcaagtctcggctgcggcctcgctgcgtcgccaccgcaatcgcttgaggaatggagtttactggccgtcggctcaagacgagggaacggaggacagcgcggccagggccagggcgctgtcggcagcagcatcggcgacgtggacaacgccggccccaaacgtgaggccgaactcggcggcgaggctgctaacgagaagcgctcggtatgcagggtgaccaacaagagagccgccgaggcagagcatcgagttcgacgggtccatcttcgtccgaggcgaggcgacgaggaaggcgatgtcttgaaaggaaaggaccggcgtcagcgccctcggcctggaagcatcccggtggccgaaaccgcagagcgcaccctttgccagcttttgcgccgagtgccggacagccctgagcgcaagaggcgcatggagatgcgtcgcgtcgagtgcgggaaaggcgtgtgaaacgatcaagcggcaggctgtcgtaaccactggcgtttgtcagccttcgggcgaaactctgatcgcgcggcaaaacgcacactcggagatgcgtagcttccggtcgttctctgcgtcgcgagcttccagcgtcgggtcgaccgagtactgcggtgtgtagggccggtcagcgtcaagtagagcgtgccttgagcagaaacaagccttccacttaccactcgctcgagaagctggtcgacatcgtcaaccttccagtacgccagcagagctttgacgaacgcagacttgcggtccaggtcgcctgagtcctcggcattgaggaggaggcgaaggagcgtccgtccaacgtggtacgctgattcgacggacaaggtcatcgtcagctgctgcgcgaggttgggatgcacgactgaagccgactgaccgctgccttcatccccgagcaagaagcccagtccgccgcgccggccgaggtagtcgacctggccgtctcccgtcttgcggacggcgaggcagacgctgccggtccccccgacggccaggatgccgccttgggctgcactctctagcagtggcgacgccagcaggagggcgtcattctggacggtcacagtcgtttcacttcagatcccaaaaccaaagggaatcgcacgactatcagctgtctgacagactagtcgtgcagcaaaggaggcaagcgcacaagaactgctcgaggggcggcgtcaggcgccgcacgtctggcgggctgtcgacgccagagatctgttcacaacggaggcaggccgagtcagcgtgctgcttatacgcagctcatcgtttttctgagtggacggaccccgagccagacgctctggaaggccaccgggcaggtgccgctcctagcagagctgctggctgcggtagacgcgtaggctgccggcagactggcgatggcggccagagcagcatcctgcagcctaaagatggtgcggaaggggtctcggcaaaggatgtcagcgaagtgcgtatgccgagcctgagaaatcgccactgacctcgagaggcaggttgttagcccgacctggcgacgggacaggagggtgaggtcgaggtcgccggcgctggtcgtcagctcggccggccagaccatcgacgaggagcacgggacgcacctcggccaagttcgctccaagagccaaaccctcggccaggatgcgggccttaccctctacgacggccgatatgacagcccgggtcttcgtgcctcctggggggagcaaaccgagaggtcgtgtgccgtcggtcggatcagcctgagggcgggccagccctcgcccggctcggcaccaggcctgtatcgacggacgacggaccagcatcgatggcgagggagagggccatgactagaccgcgttgacgggaagggagggcacgtcgacagagtcaggttcggaggggagcggcggaggtggctgagttggctgaggagctcgctcgaacgcgcagcaggctcgtcttcatcgtcagctgccaaacagtcgcagaacagagcctgctgctcgttggctgacgagatgctgctgaaccgacctggcgactaggactccctccaagaccgcaagctcaagttcggcctgtacgataatcatggattaggcgagccgccggccgtgcgcaggccctcaacgaagcccttgacgaggccgagatagagaggcgaagccagcacggcgaggacgacggggacgccgacgagggcaaagatgagagccttggacggccgtcgacgccgtggcagatgagtcgcgcttgcggccgggatcgaaggctgggcgagcctttttggagaagagcgggcgggcgtcgtgtcgaatctatctgtcgcagccggcaatggtcagcattggcggctcgttcgtcgagccgatcgtcgtgacagactcaccgcttcttcagagcctcaaaacgagcggcaaggagctggtcgttggtcagcggcttctccttgacggcgtcgtacgatggcggcggtggcggcggcgctgccggcgtcgaggtcgacgggttcgcgctgctcgttgtcgctggcgtcgacgcaggctgcagcataaataggatcagtgcgggtccgctacgggatcgacgctcagtcatcttggagagacacaccttctcatcgccgggaggagcggcggcctcggcagcagtggccgtctcgtcagacgtgacgccatcaaactcggccgagggaacggctccctcggcgacctgttcccggcccgacgtccagccgaccttgtagtgcgcgctgatggcgtcgaggtagccgtcaatgagctcgggcggcgggcgaaagatctcgagcttcttgacgacgcgctcgttgacgtcgccgtgttcgttgctcatcgtcgcgacggcaaagtcgcgcgagtacttgtgcataagaatgtcacgcaggacctggagctccttgacctcggttcgtggggcggcgtacatgatcgagcagacggcctccttgacgcctgggtccggctcggtcgtcgccgccgggttgtcgagcagggcgaagcgagcgagcaggagctcggcataaagctgatgagtgcgcacaggcgcatcagctcggatcaagcgtatccggccgcaaacggaggctctgaacgcacgctcaggagctcgagcaactcgatcgtaatctcgtcggagatgatgacctcggtccggatcttggccgtctcgagcttgcccttggcgagcaggtcagcgatatctcgcctagtctgaagataggagagacatcagatccgaccgagcagactacaagcaacacgcgaaccgaccgaacctgcttggcgatggcctccttcttcttctgaacgagctcgaggcgttggatggagagcctgcgcccggaggggggatggagaggcggccgaggtcagccccgactctgacaagtcgcacctcccgtgctacgcacttgagctggatcttcgcccgctgggcttgccaaggtggcatggttggtagggtatgatgaagacgagagctgggtgagagatgggaacggaggaggctgcttgagtcgaaggccggcaccgctgccctggccggccgtcgtcgagctccgcttcttgacctgccaacgtcgactaccgctcgccctcttccgccgcttccccaagagctcgcctgacctgtcgtcggttccgagaaggctctcgctcttgctctcctcggactcggtcggacgctgtcgtcgctgccggccctcgcatggccgtgctgccgctctgggcgggtcgtcggagcgtgctccgcggtcagtctctctcgcgacagacgaagtcgtggcctcgcgtcgctgactctgcaatgccgctccctcctgtagagcttcgtccgtacggcagcagtcgaccggccacacgcgacgtacgtcggtcgctcgcccgatggcggctgctgctaggtccgagctgacctatggccgacctctcccgcagcctcccgaccctcagccgtcgtcgccaactccgctgccggcagcccaagcgccgccggaagaaggctctcctgtcacttcgctcggcccagagggatctttcgctcgcctggcagacgagcagggcctccggcccatctacctcaatcccgtctcaagggccggcgcgatgactgccaaagccagtgcgtttgcccgaaaggaggccgagcgccgggtcgagaacgagctcgagcgggtccgcaagctcgacatcttgacggaacagctgcgctcaaggggcaggaagatctacatctcggagacgggcgtcatcgtctctgaacgcgaggcggttgccctgaagagggcggctgaagcgcgcaaggcggcgcacgacgaagcggcggcctccggaacgctcgccacctctgagcgaccgcctggcaatacgcctgagcgatatgagccgctctctgctctcgccgcgcggctgccgagccgtctactttccagtcgaccgatgactgccctgtcgagcgggctgaccccttcttcgcagctgcagtcgccgcgggtccggtcttccccaccagggccgccgccaaagcgagggccggccgcagagcgccctttcccgaggccggacgtcgctgtaccaaccaccagttatctcgggacctttgccttcagcccattggcaaagggagcgtcgacggccggcagcttcggtagcaggcgcgacccggcgatctggggtgccgctagtttgccacaccttgctcctggtccggttaatggcgcggaacctgtcaagcaggagctttccgcgtcgacgtcactatcgcagccgcgagcgactcgtcctacggcagtgactgcgttcggtgctgtctcgccgcagtggcatgccggcctgtcagcggacgagcagccgcaaccaggccttcatccaaccctttcgaccggccccttctacctgcccggcacttcgcccacgaaatctgtccgagcttcaccgactctcgcccaacgctctacggatctagctgctctgcctgcagagctggtcgcgatcgtgcgtctcgcctttgggccatccgtccttgcccgactgctgaccctcggcacgtcgacagctttccagacctcaaagtcagccggatcctgccgtccgcgtgccggccctcgtccgcgcttggcgctcctacgcgccctgggccgctgcttcaccaccctcggtctcggtctcaggccttttctacccctcgtacgccccgcctcgaccatcgtctgaagggatcctggcctatcctccacgacgcaatcctgatcgaacgccgccgccaccggccctcatcgccatctgcgctgcgctcgctaagctgcgtgcctttgacgaagtcctcgccatcctcgaccggcaaagcgcacgactatcggctcgagatatcgcggctgtccttgcgcctgcctacgagtcagcctcgggcctatcttttgctcgccgggtagaggcgctcgagcagaccgatccgccgttcaaggcgttcgtcgacggcttgctgtcggcgaacgagctgtcaccggtggcgtggcgcgagacgatgggctttggcgggcgagagtcgcgagcgacgacgactaggccagaccgatggttctctccatgatccttatgattgcatctttctcggcgaaggacgagtgcttactgctcagagccccggtgatctttgaaacgtaacatgcatgaggaggcaaactcgaagaggagaaggaggccggacccaaggcaggtcggcgagcgaaggaaggagggctgaagctggcgccgatcgagaccgaatgagcgattagcctggagatagagggagatgtgagaaggtcagcgcgggcagacgagaaggcaggcggaagaaggaggacgcacgctctccccgaaggcgacgggcgagctggaggtccttgggctggatggtgacgcgcttggcgtggatggcagcgaggttggtgtcctcgaagagcgagacgaggtaggcttcggaggcctcctggagggccatgacggccgacgactggaagcggaggtcggtcttgaagtcctgagcgatctcacggacgagccgctggaagggcagcttgcggatgaggagctcggtcgacttctggtagcgacgaatctcgcggagggcgaccgttcccgggcggtaacggtggggcttcttaacaccgccggtaggaggcgccgtcttgcgcgcagccttggtggcgagctgcttgcggggagctgtcgagcgggagggagaaggtgcgggtcagcaacagaaacgacagtcgagcaagtgacgagcgacaggacgcaccctttcctccggtcgacttgcgggcggtctgcttggtacgggccatggttccttgagtgagaggttgagggtagagtaaaggggggtgcggttggtggggtcggagggagaaggtcggcgaggtgaggctgcgtctatgtagcgaccggtccgacgcgtcaggcggcgggcggagcgcagcgggtcgggtcggcggagcttaaaatcaggggtcgcacggtcgaattcagggcgtcgtggcctggtcgagggttgactttactgatcctgcctgaccagcaaaagcttctgaaatgctagagggtgcgctcgacagagaataattccctctctttgatcatgcccttctcgcggcatagagaggtcggtgcgaggtgcgatcagtggcgagaggcagacgaggtcgcaaccggtgtagcgactctgctgcgagcgaccctcttcgcgcgcgtgcgacccccgtttcaaactccgcccggtcaagccgtcgcgggagcctgcgccccatcggccccgccttaaccgtcgagctcgggccgtccgacaccttctcttccaacaacacctcaccaccctacccttcacccaaccccacccctacaactcgaaacaatgtctggccgcggaaagggaggaaagggactcggcaagggcggagccaagcgtcatcgcaaggtatgtctcttattctggcctgcgcctgtcgacgccctcaggacctgaccgaccgcactcgcgctcccctctgtgcagatcctgcgtgacaacatccagggcatcaccaagcctgcgatccgccgtttggcacgccgtggcggtgtcaagcgtatctctggcctcatctacgaggagacccgcggcgtcctcaagatcttcctcgagagtgcgtgtcctacccttgctcatcggcgccttcacccgccacctgctgacctccatcaccccctgccttcttgcagacgtcatccgcgactcggtcacctacaccgagcactcgaagcgcaagaccgtcaccgccctcgacgtcgtctacgctctcaagcgccagggccgcaccctttacggcttcggcgcctagagcggttcctgccttgccacccctctctccttcgctcgccgatcaggccctcttcatccttcgagttcgccctccctctctatgtgtctttgtctccaacaaccgtctgctgctgttggtattggggaggggccttgtcagctgtcgtcgtctctagctcagcgatgcttggccggcacgccgctgccgaggtcctcgccggcaagcaaagcaggagcttagagcaggccggcaagagatacccgcctgcgcaggaagacttgcttgctcgccagctgacctcggacaagacgctgaccgactgacatcgaccgcctccagccaacctcgtcgtccttttggcctgagctgacgcgtgggaaagaggtacaacacgtcggcatcaagaaagcagaggcatgcgccgaggacgggaaggggtgctacaactggtcgcgaagtggagggaggggagagagggaaggtcggagcggtggatgggcctcttacatcaggccctcgccggctcgcgacttgaagcgcaagtagacgagcaacgacgtcggagatgtcagcccaagcgagcaaggtgttcgagagagccatgaaggcgacgacttacaaagaccctcgcgctctcgagtaccgaccggtacgacacgccctttgcccgaaactggttgacgcccggcctgaatggctgctgctgctgctgctgcgggtggccgccggccggcgtcggctgggcgagcatgccgagcagcatcttggagaaccagtagtaggggagctgcacgaggagttcggagtcagcgttgggcaaagaggaaggagagagggaggaaggggacggacggcttcgcggcaaaagtagacgtcggcgtagggcgggttggccggccgactactgctgctgccggtgctgctgctactcgtgccgccctcgcccatcgcctcgccaccggccggctcgtcatagacgtcctcgcacgccgtcggcacgacgggcgacgtcagcgtgtcaaagtctcagccgcgccgccagcgctcgagacagcgtcatggtcactcgtgtcgagcggcatccaagcaggcgagacggagggtcagcagaacatgcaatcgcaactctccatctactggtccttgccagcgagccaacggttgatcatctggagcgaggcctcgggcttgtccatcgggactgtgagcggcgggcggcgaggatgatcagtgtaggtcgatagcgaaaggtcgcacgggcgacatacccatgtggccggcctgatgggaacaagaagtgagcgccgtcagtgcttagcatagaagaggagatcaaagaaaggaaggggacgcacgccgtcgatcgtcatgaacgtcaggttcttggccttcttgacctggccggcgaccttgccgtcaacggtccagtcgcggagcttggcgtcgcggaactcggggccgtgcgtccactcgagcgcgtccgaccagatcttgttgccagagctgcaaggcaagggtgaatgggaaagacgttcggtcagaatatgcacgccgacgctgcgcgacgcaccaagggcgaaacggacctgttgcagatgtagtcgtactgaggaagcagagcagggtcactttagcatgaaatggcgacgacaaagaggcagtcagacgttgcgtaccttgccgatgtaaagcagaatgtcaacgcctgggccagatcgaaagtcgtcagcctcttcactcgtcagcgtctcggctgctgggactcaccgtgctcgagaagggcagcgacgtagaaccaagtcttgccgagcccatcactggcgaggttgaaggcgttgccgaccgagcgcgagcagctctggaacgggccgaggctcgggtcgacgccgaggagcgagcggacgtgcggctggtcgaggtacttgcggatcactttcgtctgcgggtagcagagcgagtcggccatctgctcgggggtgcacgtcatcgacatgtcgtacctgcagagaggagggcatcaatcagctgataacggacgacaggcttgatgcggagggcacgcacgggttgagctcggcggcccagaagggcgccgagatgtgctggccgcagaagttctgagcattctggcagccgacgaggtcaaagcggtcgaggcagttgaccttgagcatctcctcgcaccgagggagggcgagagccatggcctggcaggtcgtgacaccgagaacggggccgaggcccgaagccttcgtgcatgagtgctcgtagtctggtagaggttgaacgagcgtcagcggtcgagcgagagcttgaagatgaattgaggcaactcacagccgcggatcatcgagtaactgtcagtaatgccgttgcctaccgtcaaaggagaggccgtgtcagcagactgagcgtcgtggacgccgaagatctcgaggacggaccgatagcaaccgaggtcaggttgatggccgagccgccagcttcaacgagcgccttgttgccgtcgtagatagcggcagcaaagacgggcaggtagcgaccgccgtatgactctccggcctggcgatggtgttcgattgcactgtttcagtcgagatcggcagcactgcaacagctttggaagactgacgaggtggagcggtcgtcccttgaactctgagaatgactcgatgaagatggcgatgaaggcctggacgtctagcgcggcctgctcggcccgaccaacaacctgaccgttctcagcgtacgagaagccgactccgatcggctcgtcgagctttagccgatagcagaataaagagcgcatcaggacagtcatctcggaggcatcggtagagcctagacgtacgaagaagacgttggccttctcgttccaggagtgggggttgattttggtcgtgatgttgcccgagccgttctcgtgcagagtgcaagggccgagctgtcaagcaatgtagggtcagtctcaatcggaaagcgaacacgagagcttatgtcgcacctccatgaacaaggccatcgatgagctacatcctggacctccgtcttaggcacgccgcatgatgtcagcagggagcaacgtagaggaggcgaccatggcaggtcaaaggagatggtgggaccagcccgcagcgacactcactgatccacatcatgagagggtcctcctcgggcttggagcgcgaggcaaagtaatagaaactgcggagacgagcggcgaagatgggtcggcaaaggtcaacgccctgatcctgcgccgactacctcgtcgcacgcagaggtacgaacaagagctcctttccatagccgacgtcgatgtaacctgtgaacgagtcgacgtcggggtcgcaccagccggtagtctggatggaggaacgatcgtcagcttgcgaccgccatcggggcttcagacaaggctgacgactcgcctccttgatccgaagcgagtggttcgggaaggcctcgtgctggaggacagtgaagccttcctggcccttgaggtcgtgaagtctggctccgtcgcggtgcgacagaacacgctgcgagccctcggacgagaacgaggtgatgggccgacgggcgtccgacgggaagcggagctgctcggccgcggccgaggggaggagggcggtcgtcgccgccaggacgaggaccgagagggcagaagagggagcgaagcgcatcgctgagtgactgggttggtaggtggggtagtggtgggtaggagagagcgaggcaggggagactggcctgctctctttcgcttcgagcttgcaccacgcgaacgcggcggcgtcggccgtagccgacgacgagatcgggtccgctcgcaaactatttctctcttctttccctccgagctctcgctgaagacagtcagactcaacgaggcactgagctgaccgtcatgagatccatgatgagatgggagacgctctacccctcctgcctcgccctcgcccgccggtgaccctcctcatgccttgccgaggttgatcaggccgagctcgctgaaaagacggagctcacgcagatcagcactacttcagcgacaagcagggacgatcgacgcgaactgactggtgcacctgctcgccaacgagcttgccctgccactccgcgtagaggtcctcgccctcgcggccggcgtcctcgccgttgcgcgcgcgcagcttctttgcccgctcggcgagttgcgggaggggcgcgatctcctcgtcggaactcaggtgccagaactggaaggagaacactcttcggtcaggctttgacgaggagaggaaagggtcgagagggagctcacaagagtgctactgatgcggatcagcggccggccgggcctctcctgcttcatcttctggacggcccggtccgtcgcggcattgtagacgacctcatgatagccagccttgacgagtccgccgctcagaatttcaagctgcttgccggcctggaccactgcagtgggggatggggtaagttagcggcgaggtctgaggcgaacgatgggagcatggagacgtacaaaggcagccgtcagggacactggcgacgagccgcttgccggtgttgcgcgcccagatgtgcaggccggggtagcggctcttgccatggatcgtgagaaagttgaggtcctgcgtcagcagaggcacctgcatgttagcgtgctgtcgtcggctgcgcaggtcagagcatgctggctggactgaccgtgtggaagccggcaaagatcgcgccgaccttgccatactcgacgaggtcggtcgccgtcggtgcgagcagatgcgggccgtatgtggccttcttggtgaaggtctcgggctcgagcgacaggcctggatcagggcgtgcgtcaacatcagcttgaatcaggatctgcgcctgcagcctctgctagcaacgtacccatcgcggccatccgagcgacgtgctcgatcgcgctctggaggaggccgccaaattcgtcgcacgtctccttccactgcgggaaggcctttggctcgacgttgggcatgttgagcttctgaaagcgcgacccgagctcgggcggcgggaagcggcccatgcggtagaagaactgcgcgaaatcgaggaggagaagaggtgagcacgtcgactcgtatgggcggactagtagatgcgaccgactcacccggcactttgggtcggcgaactcggcattcaggtcgagcgggcgctcgtcgacgtcgagccgggcgatgaccgactggcactcgtcgtttgaatggcacttgggcttctcggtgttggcgagcgtcgccccgctctggtacgagtactcgggccgctcgtcctcctgaagtttctcggtcggctgagcaaagtagtcttcgagaaggtcgaggaagttggcgttgcacgacggcgtgactgaagacgagcgcaaaacaaaggcgccgtacttgatgagggcctctgcgagctgaaaggggcgagcgcgaggggcgcaggcgcaggcggcaacgtccgaatcgaacgtaatggtcaatcggagaccgtcagctcgcacacatacgccgagcgagtctctggtagggctcgcaccttctcgcactcggcctggccggcagccgaagacggttcgcggagatagaggtcgaggtcgacgaccggcaaggacgaggtgtcggccggtgcggaggcagcggcggcggaggtcgaggcgacggcggacatggtgctggagaatgaggaaggatcagaggaagccaggcgtacagacgaaggtggtcgtttgggatgaaaggaaggctggcagacgatgaaggaccgagggcgatgcggcggcccggcaacaggcacgcggccgacaccggcggaggagacgggagtcggcttgcccgccttggccgcgctccctccgacttgtcctcctcccgccgacaccagcaatagcagcctcgcctccgtcatgaccggacctgcatcgacgtcgctcatcggcccggacgtcgccatccggtgaggatccaccactaccaggacttgcgcctcggctgaccgcgtgtaggctgcgagctgctgacggccctccgtcggtcgggctgaccctctctcctgcgcgcggcgcgctgccttccagggtctcgtcgacgctcgacaagtcggtcggcaagaagtatctgacggacggcagcaacgagacgtgctggacgtcggcgaatgtgcgtcttgtcccacccgagcccttccgcgtcccaggagctgctgcgtctgctgctgtgctgccctgcgctccgggcgtccggacgagcagtcggcgctcgcaatactggagcagcttcgggtggttctgtggttctcgagatcatctcgcagcaatgatgctcgaagctgaccttgtctcgtcgccgctcgtcctcagggtctgccgcagcacgtcacgttgtccttcccggcgccggtgaggccgacgtcgctgtccctgacttttgccggcggcttcgtcggaacccactgctcgttctcgtcctgcccgacgtcggctcgcaaggaatggacggtccggcaccgattctacccggccgactcgaacaagcggcaggactttgcgctcaactcggaggacgcgggtgagaccgagggcagcagccgggagtggcggatcgagtttgagaagggctccgacttctttggccggatcaccatctacgacctccagctgatgggattggactcatgaccttattcgagccgagcgcaagcctgtccgttggctcgcgcacagcctgccgggacgtaacggggcgtggagataagtatgcacaatggcgaggccacgagctaagagggaggaggaacgatagatgcaaagcccagagaggtagtacagggtaggtcgagtgcccgaggcgaaagaggcaagctgagagtgcggagcgagcaggcggagagacagaggcggagaaaggggagagcaggaagttgacgcggcgtctcatgcctcgacctcgagcagacggacgagaccaaaggcggcaccggctgcagggcaagcagaaaaggttagttcacatacaagggaggggggccagctgcagcaggacgacgcaccggccaaaccgccgaccatcattgtgctgatggcgccgtacaggtagccgccgacaccgccggtcgcaccggtaaagtgcgtcttggcgacaccgaacaggaggaggatgatgagcgtgacggccgacgagaacatgaggccgtgggcaacgtcggtgacaaagaagtagggcaggagcgggcacaggccgccgaggaagtacgagaggccaatcgtgagggcgctgatgtagagccgcgagacgggcgtctcctctttagcagggagggtaggcaggcagatcagttgcggccctctcaaagtaaggataagggtgtgcacgccgacgcaccgagcccctcgccgaacttcatcaggaagccggtgacaccaatgtccttgctccacttgaggccatcgacagccttcttgtcgcggccaaacttccaccacttggagtcggagctgtcgtcctcccagtcgccggcctcggcctgctcggcctcgacccgaaggagcgactcggcgacgacgcgcgagagcgactcctcgactccgaccgcgccgaggacggcgtgcacctcgcgctccatctcgccgtggcatgaccgcaggacgcgggcgtgcgtctgcttgcgcaggtagtggaagctagagtcgagaagggggtgggtacagcgagcgggtcagcgacgccgtttgcaaacgcagcagagcagcagctagacccactggtcgagctcagcctgcgaggcgaggaagcctccgatacctggtagagagggtgcgcaaggtaggagatcagctcacggcgctcgccggccttggcagccgctgacgcagcacgcagggaagagcgcacccatggagatggcaccggcgatcagctcagccaggcctccgaggacgacaacgcgggcgtttccgaggccggagagacctgaacggatgggtcgggaggcgggcacacgagcattggtcagcgactgggctgacggagacaagctcgttcggccggggcgcctgcgagcagctgagactcaccggccgtgagagcgaaggggaccgtcaggccgtcactgaggccgatgatgacatcccggacctgcgagcatatccactcaagtcagcagaggctcgccagctggaggtcgccgaaggccactcacaatgtcggggtcgacgagcgtccgctcgtcgtcgcccttgagctccttgcagcagacgccgccgtcgggcgcgccgcacttggtcgcgagcgggtcgccctcgtgctgggcctggaggacgtcctgaacggccgagagcgagcgcgaaggcgaggccgagcgcgacgacgagccggacgacgaccggtggacgggccagagcgagtccttgccgccgccggcgcccttgcggccgggtaggggatgagcgtcgcccgacgacgacgacgcgccggcagcggccggtttgccaccgcagcagttgacgcccttggggcaggatgaggaggcgaccgacatggattatgagtctagggatgaaggaatgaagacgaggatggtggtcaaaggcgagagcgactagtttaaaatcgcaaggtcaagctctcgctcgctccttcagcccacccccgacccgccgacgcccgcgcggagactgatttcgccggctatcaatcagcgagagattattggccaggctgggccaaacgtcgcgcagccgacgccgggggtccctcggcccggggtcgggcaccccgctcaaacccttcgaggagcaaaccctggagcgctgcgcctcccccgacgtgcagtagagacgagcatgtgtattcctggaccaggcgcggcgaccattctacttgccgagcggcttggacggcggccctgcgaaagagtcgagctggagagagaaagacgctcgtcagccaacgtcagcctcgcaaggtcgctggactcacgagcgagttgcccgagatgaccgacgtcgtgcagaccaggaagcgtcggcctgggatggaatcggctcgtcagctaggcgtctctctcaacagccgtttagcgaagcagcagggcctcacctcgcacgccctcggcgatcttgcggagcgcggcaatctcggtgaaggtgcagcctgcgagtgtgaacgagtcagcgaggcccttgttgatggagatcgggttaaaggctccacctccgacgaaaaagacgatcgtcgtggctgtcgccgccctcgccacacctgcgggcagagcgtgtcaggcgtcgtcggcacaggtcaggcggccggcggagaattgacgactcacggccagatctcgacatgtcttcgaggtcaatcgtctgggtgacgtcgaatgtcttgcccggaaggcctgcaagccatcgccggcaggtccaagtaagcaggcgagtaaagaggaagcgttgcaggggtagacgcaccggccagcacgtcctcaaagcccttccagccgacgatcgggtttgcctcggaccggacgcgtttggctgcggtgctcggcccggcggccgtcggtgccgacaagacggcgctcttttgggcgacgcactgaacgagacggatcgagagcggggcgtagcccgagtaggcaaagctgatgtcgtccgattcggcatcctcagcgtcctcgacgacgagacggagatgcttgcgcacggtcgaaaagaccggcttcggtgccgagctagccgtcgactggcggacgaggaggcctaccttatcgagcacgaggaggaacgggagcttgtcgtagccgtagacctgaagaaactcgcgccggattgggtcaaacgacttggtcttgatcccgcccgatacaagcgaatgcaggacgagcaggcgcagcgtctggttgagcggcaggccgcgcgtgatgagctcctcgatcgacatgagctgaattgccaggtcgtagccgctgaggatatctgttgagagcaggcagagtaggttaggggtcggaccattggccagtttgcgtcagaagaggcgcactctgctggatttcgaggctcttgttgaagtcctccgaatgcgtgacagcagcgatctcctcgctcaggcggatgtctggcgacaggcagcgaatacgtcagccgcttagctccactggaagaggcgagcgcaaggactgacggagaccgagtgcggcctgctgcttctgcaggccaggcagcttgctgacaaatgtcttcatctgcttgatgtccttgccttgcttgccctatacaattgaaagcgtcaaaggagggtcggcgataggaagagagcaaaaggcgggcgagtgacacgcacctctgtaatctcgctctgcaggcgacgcgccgtctcgctcagccggtggcggaccacctgaaagttgcggtcgcgaaggtcggcaaagagcgtgtcggacgagttgagcaagtgcttctttttgccctcggtcgcggccgtcgaaggggcaccggacgttggcggagggttggctattgacgccggtagctcggcattggctgcaggcggttgagagggacacaggtcagctgggaacagggcgtcttgcgagcgagtgcaagcggccgcacagctcttgataccgaaagtctcgtcgacgaggccctcgtacgtcagcatcgtgagcatcggcgtcacccagtcggagctccggtcgatgaagatggccgcgtcgatcgagggcgacaactcgcgcagagcctcgctaggatctggatccgtctcgcgcaggacagccatctgttcgaccagcctctgcgaaaggagtcgtatgagagactgcggtcagatctgttgccactgtggccggcagttgagccggacgcacctgcgagacatcccccttgccgaccaaccgcgggacggttccaaacgtccgttgcagctgatgcatcgcctccgcagcatagtagacggatgactcgtcgccatcctggcggcgagagtggatcgtggggaggtcagatctagcgagggccggtcggcagaggcagaggttggacgcacgaggaagatctctttggccgcgtcggcgagctccaggctcagcacgtccttttcgagcggtatccagcgcagcgggtactcgacgagctggacatcgcccaaaactccctcgtcctcgaggatccgccggcaaagtgccgtcgcgcgcgggacgaggaccagactgtaggcgtgctgcgccgccgacgtagccttgagatgcgccttgatctgggctgcgagggttaagcaggcgtgtcaacctagctctgatggatccgatgatctgcaaggggcggccctaccggcgatcagcttcatccaccggatcctcggccggcacatccacacgacattgcgaacagccggatcaacgacgagcgggcctggctcgagccaatggatcttctcgaccgcttggtgctgcaagcagccgagagcaccgcacagttcagatcagttccgtgagcatcagggacgagccatccatccgtcggtggactgaccttgagcgtcgagatctcggtgatgaggccgaccggtgccgccaggtcccgctcgaggatgagcgtcttcgcgccgggaatcttggagcaagcaacgagcgccatcagtctcgtggcctcgcagcagacgagcagagcttgcgtaccgagtagagggcgtcgaccagccctcgcttggcaacgtcagagagcggcgacgtgtcgagcaggctgtcgtcttcaactgacgggccgctggaggagctcagcgccattgtcggggcggcgggtgggctcggcgggctgaggcgagagagactagtcaggcggtctgagggcatgagcagagcggctctaggaaggaagcccggttggttcgaaagggagcgatggtcaaggtcgggggcaggacccaggaacatctgggccggctgcgagctcagacggccgcccctccgacggtcatcatctcccaccttcctcacctcccgccaagccttcccgcagtcatgtcgcgctactcggacgcgatcaagatcctcggtcccaaggtccacgagacgatccgaacgacgcccgtcctcgttgttggcgcaggcggcatcggctcggagctgcgtgcgtcgccagcacctcgtcgcgtcgtcgactgatcctttgcagctggaggactgatctgacctcctgaactggtaatcgtccacgagcagtcaagaacatggttctagtcggcttcgagaacatcacaatcgtgcgtcgcgcttgatctctcgagcctagctcagcaggagctcatacgcactcgcctgttacctccgccttccaggttgacctcgacacgatcgacctctccaacctcaaccgccagttcctcttccggaagcctgacatctcaaagcccaaggcatcggttgcggctgctactgcccggcagttcaacccgaaatgcgcgatcgacgcccggcacgcgaacatcaaggacgaggcgttcgactcgctctggttcgcgcgcttcggcctcgtctttggcgcgctcgacaacatgggtgcacgcaggatgagctggcgatctagccgaagagatacagggctgacgctcttcttctctgctccccagacgcccggcgacatgtcaacaagatgtgcctgacggccggcgtgcccttgatcgagtcgggcaccgctggctttgccggacaagtccagccgattattccagtcagtgcgctgcgtctcgtcccagtgatcgtcaggacatgcacgtgctgacactgcttgcctctgtgcggatgtatcagggccggacgacgtgctacgactgcaagctgcgaccggtgccaaagacgtttccggtctgcacgatccgcgcgacgccgagtacgccgatccattgcatcgtctgggccaaatcgtaccttttcgtgtgcgtgattgggtgcttgctgcgaaaaattgtcgcttgggctgacccgctgtccttgccgagttgcagtcagctctttggcgaggacgacgagacgaccgaccaggacgagctcgacaaggcggcagaggacggagagaatggtgcgccccctttcgctcccagttctcccctacttggccctgaccactcgccttccgtcccagctggagagatcgagaatctcaagaaggaagcggcggccttccgggcggtccgcaaggcgatgagcaccgagggcggcgcccggcgcgtctttgagaaggtgtgcattcgtctctggaaacttgcgttgagctcaaagctgacaaggcgctcgacgaccgaccaaggtttttaacgaagacatcaaccggctcctgcagatgaaggagatgtggaccgtgcccggccgggtcaagccgacgccgcttgattacgacgccatcatggacggctcctttgtcttgccgccatcgaggcaagcggcgccggcggcatctggcagcgcagctccttctgcaccggcatctgccaagggccagagcggcctgaaggaccagcaggagctcagccttaaagacaacctcacgctattcctttcgcgctgtgaggcgctcgccgagaggctcgtcaaggacccgtcgacgccgcttgcgttcgacaaggacgacgacgtgacgctcgactttgtctgcgcgacgagcaacctccgcagctttgcgtacggcatcgagccccagacgcggttcaaggtcaagggtgagtcgaggcggtgccggcttcgaagacctgcgggctagagactgaatggctgcgacctgttgctcccttcgcgtagagatggccggcaacatcatcccggcgatcgcgacgacaaacgccatcgtggccggcatggttgtcttccaggccgtccgcgtgctcgccggtcagctggccaccgtgcgcgagcccaacctccagcggtcagaaacggccccgatcgtctcgcacaatccatcgggaccgaatgcggcctgcccgacgtcgagcgaggcgtacctaatgctcgcgtgcgacccggcacggacgaccctcggcgtagtcctgcgcgacgtcgtccgagacacaaaagggctcgcctacgggcccgagatcaagctcagcgtgtacgaggccggccggttactgaacgagcccgactatggcgatgacgatgatgagcggctcgacaacgaagacaagacgctcgagcagctcggatgcggcgttggcacgtggatctcgatcgtcgacgaggaggatgacgaggacaagttccagacggtcagcatctcggtttgcaagctgtacgtcttaacccttcatccccctttcttgatcggtcgctgacccagccatcattctctccacaaagtcgcgacacctccgacgcctcgtcaacattcgtcctgccgagctcgctaccgaccgttgtcaaggtgcctcagccgccaaagcctcagccggaacagacgaccgaggccgcttcgtggggtgctggcaacgctgggccggccgttgacgacgacagcgacagcgatattgaggtctttgacgccgccccgccgccgagcaaggctgctgccgccgcgcaggagccgaacgcgatcgtcggcaagaagcgaacgctttctgatgaccggccggcaggccctgcggccaagcggatcaagggcctcgcctatgccgtcaacgctgacgaccagatcgagatcgacctgagcgacgaccagtagtcgagctcgagcagttatccatgccgctccctctcactgcctgtgttcgagttttttttcgcttgctgcctgctgagccgacaatctctttccgacgcatggcaggcggaaaaagtctggcaggcactgcggtaggcctgcttggcagatgaggagcgcatctgaccatggcaaagagatcaataagaggaatcggacaatcggggccgccccttgctctcgacctcggcgacagacaactgccgctgatcctcgctacgcggctcagatgctcagaataggaggccgtcgaacgggtcggccttcttctgcccctggccggccccgttgggtgccggaccgctactactattgggcccggcggcagtctgtccgaatggttgctgctgctggccgcccatcgcgccgaagtgcgaccgctgctgctgctgagctgacgcgttccagaccccgccgccgttgccgttgaagccacccggtgccactgccgaggaggcaccgccgaagccctgctgataaagggccgagagatcgatcgccttcttggcctggagaggctggccgctgccgccagctgccgttgccggggccgaggcaaagaagtcgagctggccgcctgaggaaccggtcgctgccggcgacggagccgaaaagaggtcggccggcagaccgccgagcatgccgcccgtggcggtcgatgacgacgaggatgaggcgccagcgacgtcggacgtgttcgggagggcgatgctggcaccggccgggggcgaatcggcgaaggcgtcgaacgagatgaggctcggctcggctgccggcggggccgtgtactgcgagacgtcgacgccgcggcctttggcccagtcgccccgcttgcactcctcgaagcgctcgaggacgccattgatgaggtcgttcatcagcagcagccggtcgagcgagtcgggcgcctcttctgagacctcggcgatccacttttggatctttggccgagcggcccggaccgcgcgcgcaacctggtcgtactcgtcgccgtcgcggccaatcgtcttgccttcatcggtcgagttgagcatgtcgttgaggaggatcgccttgctctgcactttgttgagctcctttgccgtctgctcctcatagtcgggctgctgatctggctcgaagcccgagaggtccttcatcagctcctgcgccttgagcaggtccttcggtgtccctcgtcggatcagctcctggagcttggccgacttagcttgccggtcctcctcttcgagctcctgcggcgacttgaggttctgaatcggccagggcaatgacgctctcggcggtcagcacctcgtaacggatccctctgcatcgagccaatcggtcgcacctctgtgtcactcggccccatgaccgacgctcctcggaactcgcggaaacggtagcctgcaggcaagaaggtgtaaccagattagtgtcggcgtcccgagccaggcttgagagaggtcaaatcgcacccttgtacgacagcaggcggtgcatgtcccggatgtgcacgagatcctccttccatttcgacgagacgcagagcgtgttcttccactcatggatgagctggccccgagacaaggtgcgaaagcggtcaacatttttgctggcttcctggagagatcagaagccttactcacctcgagcgtcttgctcatgacgaccggcgggaagacgggcggccgctcggggaacttgcgcacgagctcgttgaggaactcttttgtcgcaatctggagctggaaggggtagccgcagtttttgacgagcgtgtcgagcagctgtgagcaggacaaaggcggtcgtcagcttgaagggccgacagctacctcaggtcgaccggcccgtgcgactgcgggcggccggccaccgctccgagaccgagctcgcatcgagccctcctccttcgctgagcgcttgaaagccaggccctgacagagagagcgacccttctctccatgaagaaggccgccgtctggttcagctgcttgagctccgacctcatcgcctccccggtaaccttccatcgcagccgggccggtcgcaacaagggcagcaaggccgactcacgtggagggcgagcacgccgacgtgctggttgcggctgttgacctcgccgacgacggccatcgccgcctcgcgcggcgtgttggccttcttgtcgttgatgtagtcggccagggcgaggttgcggtcgtacgccggctcgggcagcgacgggtcgcacgcctggaggacgaggtgatgcgtccgcgacgtcggctgcagcgacggatacatggctggaagacgaggaagcgcgtgcgcgccgagagagaagaggagaggaaggcgacggtcggagctgctaggtctaaagctctcgctgctcgagcgggctgctgaaaagggaggatagactgtcgttgtcggtcgagtgagtcgtcgagcatcttgcgccgcgggctgggagccggccgactgcgtgccgctgctgacaaagacggggcgtgctcgtcactcgatggcacgaggcgtgaggcgacgctgcagagatgcggtccaagagtcgtcatgagtcatctcgagtcgtgaatctttccatcgcctgtcctccgtcctcgtcagccggtccacaagcaccactttgtgtcgcggcgcgagttgaggtagatctctccggccgcactagccgccgcccatgaacgcttctggcccgggctgaggttggtgatctgtcggggaaagggacgcatgaaagaaatcagctgctggatgatgccggtgagcggcaactctaggcgaacgtcacgcacgaggtaccgcttgccctcctcgagcgcatcctcgcctagctgaacgacgtcccagaggcagagctggccgatccgcgcgaccggccgcgtcgtctgggcgtctctgaacttaacaatcttgaacgaccgaacctggcggggcggacaccgcgtctgtgaagggtccggccggtgtaaaggaatcagccgggagtcttgccgaggtgcatgggcgagacagaatatcgagtgagcgcacctcgagctcgtctgcgatctcctgctggacccggccatactcgtcggcgtacttggcccgcatgaaggacgccaggttggccgtctcgcgccggtcgagcgtccggaggaaggccgccttgtcatcggcgtcagcgagctggtcgtactgctcctccgactcggccgagccgcctgcacaatattgccaagacgacatgtcagccgcagcgtacgcgagagtctcacgctgcagagtcgatcctcaccggcttcggtcggtcgcgtgctgccgacgagacgctcgacccgctccgtcagcgtcagcaggacgtcgagccgcttcgagacatcgtcctgcacagcttgggcctcctcttcgtacttggtctgggcggcagaaggaagcgcaggggtcagcaacagcaagagagaccatctgcgctggatcgtgagcactcacctcccactggcgtcgcgcgatgcgctcctccttgtcgccccgtggctcgcccggcggctcgccgtcaggcttttggtcgacccagccgaccgggaagcatttctcgacgacaatgtccatcagggacacgaggccgccctcggggctgagcgaagagaggcaggcgaccggcagccgggctgtcggcgaatagaaacccagcgttgcgtcccaccggacgagcgaggtcgcgttggccgtcaagacgaggtgcgacagattggcctcgaagcccttcaacggtggcgagccggaagtagtcgactcgagctgacggggcagattgacaggtcgtgtcagtctgagagtccaacaagaacatgaagccctccaacgcaccctggcacccgagatgccaatcttgacgccgacgcgaagcttgcccctcttgatcgcctgggcaagaacgtcgtcgacctcggccgcgatccggtaccagccatcggtgagctcgatcacgagcggcgcagcggctggtcccggcttagactgtgcggccgtgctcgtcggcgctgacgcccgcttcggtgcctctgctgctgctgctggggggacggttgagacagccgtcacgcagaggatcatcggcgccgctggggacgagtcctgttcgtggatccgtcgcaggcatggccggtggccctggttgaactcgcgctcgtacctgaggaggcaacggagagacgtcagtcaacgtttcgtggagagtctagcgatggccgccgagcgatgaggaaggcactcaccggtagagaagctgccggatcatctcggtccagccaaacttgccgcggccgctctcgccttcgatgccgctctcaaagcccttccgccaccggtcgcggccggcatcgtcgccttcgctgtcgctgtcgcgccggcgcaggcttcccatgtcgacgccgtcctcgccgtcggtccgcttgtccacaatcgacggcagcttgaagaagtactctggcttggcccgacagaggcaggcaagcttccagaggacgaggctccagtggttctcgacccaggcgaggcccgtgtcggcctgcttgccgccgccgccgctggaggaagacgacggcgccgcggggccgagtctgctgcagccgagccggacgagcgtcgcgtgggccgcctcccagttgactcggccgtcgggcgcgatgtctgcgacgtcatccgaatccgaggccgagaaaaagtagaaggaggcgttggtcaagttgatgacggcaatctcgtccggcctgcagggtgaagagacgtcagcagggttggtcaaagccagagctgcccgaggcggaagacgcacaagccgtagaggggcagttcctcctcggcatggaactcgggtcggatataggcctcgcgcatcgacaggcggttgacgggtgctgcggcgaaggaggcagatcgcgtcagcagccactcccctgcgtcaaaagacaagagaaagagcgtcgcacgcgtcaagtcaaagacggcagggtaatcgtttcgcagcggccgagcggttcccgatgggcgccgctcggcccgaccgggcgtcgccgtctgtcggcggtcgccggtgatgccagcacgaagcggtgtgcccgcgacgctgacgagccggccgcctagaggtgcagccggagtcgatggaccggcagcgatggttgatgtggagattctggctgccgagcccagcgtgactgcggtcggcgtcggctcgatggcggcgggctcgccagcagcaagggaaaatgccggtgcgacctcctttttaaagggtgtcgcaaacgccttcctcgtccgacgacccgctcctgaaggcgtgccgccgactgagttgggcgttgccgcccgaggggtcgtaccgagcgagatgccgatgcggcgcagcggagtcgatgcgcctgtgctcgggccccctgcctgcgaagccgcgtgccgggcggacgacgacgggccgggagaagcaaaagacgtgtgcgagccccgccgggatggtgttgaggcgagatgggccggcagcgctggtcgcggccgcggggcggcaagcggcgtcggcagaggcggcgcagcgagtggctgctgagccccactgccactctgagagagcggcggcggaagcgggatcggtttgggagggatgtgtgccgctccgagccggcgccggtcggggagcagtgtcgcgctcggcggtggcctcggggcagcagccgaatcggaggtggacagctggcgcaggcttgaggggtcaggcgcgggcccctcgccattctcgccctcgagcagactgaaggggacacgtgccttgcctttgcccttcccgctgccgcccttggccgaggcgtcggtctgctcttcgtcgtccgagaggaccgagcctaggagcttggccgctcgttcgagcgctgcgcgcgacggcggggcgaacgacgtgccccgcgcggtgagaaaggtgatctccgtgggagtctgagtcgatccaaacggcactgcgaggtcggtatcagggtcagcacgactgagatggctcgagcaaggcctgccggacagctacgtcacgaagcggtcatgggagctggtcgcgggggggaaggatcagactcacgatcgggctggacgaagtcccattcgtcctcggcggtctgtccggaatccgctgcgtcgaaatgacctgcgccagagtgctcagggctgctaccggccgtccagctgtcgcgcgagaccttgcgacgtttcgcacaggccgcgtcggtcgccgctgcgtcatcgccagcctggccatctgggccgccagcaatgggtcgtgccggagccggtcctttgccgagccggctcgtggcggacagagtggcaatcgatgtgaaagcaggagcaactgagctggcgccggccggcggcgtcgtctgaccggcgggagcgaggtgaggtggcggcggcgcgagcgcgggaggggccatcagccagttgctcgcccgctcgtttggctgcgagctcggcaggcgctcgtcgtcgtcgctgctaactccagcgcccgcaaggaggccaatcaggcttggcggcggcggggccgaagatgggtccggcggcgagagaaggaggtcgtcgggcagatcaaaggcgtccgggtcgatgccggcgagcagatcggtgaaggagttggcctggcccggtggccccgtttccgttccctgcagagacgccatccgatgcgagagcaggagagagagaggcgacgggcgggcaagtcccaagtagttgacaaaactggcggtcgaagaaggaggttgaggtggaaagagagccacggggtcgcgcgcgcgcgtcttgcgctcgtgccgggacgcgtcgatgctgctgcctctggaggagctgcctcatttcccgccgtggcttaatagctcagttcattcattccctgagcagagagctatcgcccagagcagttcctagcgatcctcagtccagctctggtcgaaggcatgaagggcaggtaaaatgagggcgtgagctctggcgcttcaccggggttctcacactcgacgtcggcttcagcccgccgtggccaggccggaggcgatggtcgttgcctttctcacctccatcggtttcagtctccccctttacctgcttgggacagctgcatcgcgcgcggcatgcttctctcgctcgctccgtgtcgtctgcgagcggtctccccgctgggcgcgctccggcaagcgccgccgaccctcgccctccgacctcggtcatctgcaacccggtcggcgtcgtcgacgctagcgagcacgggttcggcgacttctggctcgtctacgagtcctccagagtcggccgagagggctttgctcccgccggcgctcttcacgacgcccatcttctacccatcggccgtgccgcacgtcggacatctgcactcgctcgtcctcaccgacgtcctcgctcggtacgcccgcctgcggacgcccggccggccagtccatatgagcaccggaaccgacgagcacgggctcaagatccagcaggctgcgcgcaaggctggcctggccgagccggcctttgtcgagggcctcagcggccgctttcgccagctcgccgacgacgccggcgtcgactattcgacgttcatccgaaccagcgagccgaggcaccacgcggccgtcgccgacttctggaacgacctgatggccaaggatctcatctacaagggctcgcacgagggctggtatgccatctcggacgagtgcttctacacggccggacaggtgcacgacgtgccgtcgccgaccgagcccggggcgaccgtcaaggtctcgatcgagacgggcagcgccgtcgaatggacggccgaggagaactacaagtttcgcctttcggccttccgcgagcggctgatcaattggcttgagttgaacccggccgcgatcagcccgccaaagtacgcggccggcctgctcgccagcctccgagccgagccgctcgacgatctgtcgatctcacgcccggcctcgcgtctcgcctggggcgtgcccgtccctggtgacgcgtcgcacaccgtctatgtctggtttgacgcgctcgtcaactatctctcggtcctcggctacccgtcgactgccgaggcgccaggcgggcctccgcccggttggccagccgagctccatgtcgtcggcaaggacatctttcgcttccacgccgtctactggccggcaatgctgatggctcggggtttcgcgccgcccaagcggctgctcgtccacgcccactggacgatgggccggatgaagatgtcgaagagcaccggcaacgtcgccgacccgaacgaagcgatgcgccgggcgagcgtcgagagtgtccgggcctacctgatgggcatcggcagcgacctccgcgaggatgccggtccgctctcgtcctgaattcgccctctgaatgcctcagactaggagctgacgatctccgaaccccccttgcagactacaactacgccaacctgacgcagttccacaagattctctctgaccagatcggcaacctcgtcctccgcttctcgggcaagaagattgtcggccggctcgccacgagctgggacgccgcggtcgagccgatgatccggaccgagggcgacgagccgatcgagcggctcctggcggagtgccggccaaaggttgagcgcgcgcttgaggggtgcgaggtcggcaaggcgtttgagtttgtccttgccttagttggagaggtgggtgttccactgaaatcccccttcactcagcttcgtcggaaggctgacccccttgctggccccctcctcgcaattcagaccaacgcgcgctactcgtccctcaagccttggctccccgaaacgcccctctctgacatcgccaaagcctccttctatgcaatctcggccctccggctcgccgccctcttcctccacccgatcatgccggaacggacgacaaagctgctcgacaagctcgcgatcccgtcggacgagcgtgtctgggcgcggaccgagtgggaggggctcgagcgcgaggcggcgagggcgggcgactggccagcggccatccaggacggtgttcggcgcaaggtcggcggcaaggtgctctttgcgcggatcgaggacgacgagccatgaccttctgcgttccttgctgcttaaggccgaatgtcaacagagggcggtgtgccgctcgacagctggatgagcccgagctcagctctccgcggtgcgttgggtctggtcgtgaagggggggtcatgaatacgagcggaaagcgagctggccgagggactgtatcgtacgagattgaagctgcaaggaagtgctggtggcgggcgacccctcgcgtgagggcttttacgtctagacacgagatgcgagttgcgaagatgcggggtgggcggagagggaggtcgttgaaggagagcgcgcgcgcgagagagagagagtgagagggacagtgagaaagagagtgagagagagagtgagagagacagtgagaaagagagtgagagagagagagagagagacaggtgagttgtcggtcggagaccgtctaagtaggtgttggaggaagcggcagccgctcagccgtctcctggacgaccgacggccggcgtacgggcggcccacggcggcccaaaaggcgtccttcgccggcgccggcgtcggcgccgtcggtctcgtcctcggcctcttcttcgacgatactcgagctgctgctccttgacgactgcctccgggcgtgctgcgagaggccaaaggtcgaggagagcgtcggcggcggggtcgagtacgccgagggctggggcgattgcaacgggggcgacgacgagggccggggtgacttgcggccaacctcagccagcggcaagccctccggcgacgccgtccgtgtcccgccagcgaggttctcgccctcgcccgaggccgccgtcgacgacaggcccttttccgtgctgtcgagcgcgaggagctcgtcgtcgagcgggggcgggacgtacttgctccatttgcggatccgggcaccgtacacctgcgtggggccggccgaaagattcagtcagtcggtatgctaaccaatcagacggccaacgggcgagagggctaccgtcggcggacggaacgcacatagaagacgacgggcgcgggaaagaaaacaacgcagagcaggccgaggagggtgcacgcccagccggcgccgagcttctgaaacatctgcgaggagaagagcggaaagatgccgccaaatgcgaagctggtcggtcgaagacgggtccgggactcagtcaggcgctctaccggggggtcagaggaggggaggcgcaccgcataaagtttgagccagcgaggaccgagcccatctggtacgtgtacgtgtcggaaaagtaggtgaagacgctctgcgttaggccgagctggccgaccgagaagaggaggccggacgtgacgggcgcgagccagtggacggaggggccggacgtccagccgagccagaaactgcgaacgcgagcgaggaatgaaagatgctcggtgtcatcgagtcctcgcggtcgactggagagaaagagagtagcaggtcagtctgcggcactcgacgccggttgatgacgcgtgattgaccggctggcgagcttcccacccccgccgccgctcgccgccgccgccgctgctggccgacctccggtcgagcgtcgacgacccgatgtttgcgtcggccgctctcgtcgcgctcgggccgtatgcgctctatgtcgccggctcatgcgcgtgcgcgctccttctccaatgatgccttccgtctttagatcctcctgtctctctgttagcgaacgaccgcggggcgagtgagcgagcgaaagaaggagagcctgtcggccgcatgtgatcgccgccgtttgactttgaccgcgcgtccagcaaacacgccacacgcgcgtccgccgcttcagcccctccgaccttgaccaaccccctgctacgcctgccctcaacgcccagcccgcacgcaaaccccttcacgacttttcattcctctgggccctcctggccgccctccccctccttcgagcatgtcgagccgcatgtcgctcgccggtgggcctcagcgcgggccgccgccgccggtcggcccgcccggccagcgcaggcggacgaccaaccagctccagccgacgtcgtctggcgggccgccgatgccttcgagctcgcaaacgtcggccggaggagggggagggagtaacccggggagcaaccagggcaaccgaggaggagcggcttacggcactacgccgagggcgagcacaaagtcagtctggcgggagcagctctcggagactgttgttggatgacggctgaacgaacatcgtcccccccacccatctacctctcgctcgcttatctccagcatcatgcgccggtcctcggtctaccaaggcggccggcaatccatcatgacgccctcacacggcgcctcgtcccggctcgcgccgctgccgggcacgtcagccttcgatgacccgcggccgaccaagtcggccgccttcaaagaccaggccgggacgaccattatccacttctttcagcgccatccgcgggcgccccaggtgacggagaagacgatgctgagcccgacccaggtcgaatttcagcaaatgttcaaattcctcgtcgtcgccgtcctcgacgacgactacgcatttggcaagggcggaaagaagtttgacgaggagtgcatccagctcctcaaggacctcgagtatccggccatgaacggcctcagtcggacggcgatcggcgcgcccggctcgccgacaaactggccggcgatgctcgcgatgctcctctggctcgtcgagctggctgacgtgcgtccccttgcatccgcctgactgcacgacgtagtgacacagcgctgacgtgcgggagccctccctggaccccatcagacgcgcgagagctggatgtcaggcgaggtctacccagactacgacctgctgccgcccgagcaggtgccgctcgacgcgccgacgctctatgagctcttcctctgggactacctctcgaacgcctacgccaagtggtacgagggctcagaagagtgcccggaggaggatctccagctcgaggtcaattttcgttagtccctccgctgtcctcaccacggaacgctgccgatcaggctctttaccgtttgctaacctgtctttgcgcgcggtacagagcgcaagttccagtcgttcgacgaggagatggaggccaacgagcaactgatcgagcggtgccagcgcgagtgggccgagctcacttcggtaccggtccgtgccgttctgcccagctcgcgccgagacaagcagcctgaccgcctcttgcgcgcactccctacaggacccgctcttcaagctcaacgacgactttggcaagtttgaatcggacaagaagaagttcatcagcctcattgagcaccagacgcagaagcggaacaagctgcagaaccaaatacagacgacgacggatcagatcgtgcagactcgtgcggaccagtcttgatcctgtttgggacgcgccgaggctgacctcttcgtcctgatcatcttcctcaggtgccacgcaagagtccctgcaggcggagctggcatcagttcaggccgccgtccgtgtccagggcctgtcggtcgaggaggtcactcggctcaacaccgatcatgagacgctcaagcagtcgttcgaggagacccggcagaaggtcgctcaggcgcgggcggatctctggcagcgcgagatgctcgtctcacgccggagcgaccagctcgaggggctcgtcagcgactacattgcgctcatctaccggctcggcctccacccgtcgccgccggccgaggttggcgacgtctcgttcttcctctcgtacgagcctgcggggacgaccgagcgcgagatgctctcgggcgacgtccgggggacgcttgcgccggcgctgtcccgcctgctgagcggtcgccggctcgagatcactaacatcgagggcaccatcatcgcagccgaccacgacctcgacgagctcacgcaggccgtcgaggccctcaaagaggagattgagatccgggccgcgcgcgtcaagtcgacgtcggaccaggccgagagccagcgcaacgtgcgtagctctcacctcgccagcgcgctgacttggtaggactgaaccgccctctccgcctcgctgcctcccagatcgcgacggtcgagtcggccgaactctctgcccagcagcagcacctggagcgcgaaattgcctcatcccgggcgatgtcgaagcaggcgctgctggcgtccgagtcaaagatggagacgctcaagatggagtaggtcgaccccagatctgcctctttgaaggcacacgatctgatcccagctatgacctcgcctaccgcctcaggcacgacaagatcgttcacaacatctcgaaaaaacgagaggacacgatcgctgccattattcaccagaccgagtttatcatcaagttcaaggaggccgccggcgagacgctcgagggcctcaagcgctttgccgagctcaactagcagaccccttcccttccgttgactctagtgtaatctgcgcttctcgcgaccgttcgcgcgctgtatctgtatcccggcatccggcaacgcgcctccttaatcttgcttgccgccctcgccctcccaccttcttctaactcccccttttcccttcggctttcgatcccctcctatcctgctctgtgcgccaacgtcgcctcctttttgacctgatacgcatcagcacttcttgcatgtcgcacggcctgcgctgctgagataccgcattgagagtctaaggctgggagggcaggtcgctggctacgcttcggtcgccgccgcctgggcggccttcatcttgaggatgtgggggctgatccacttttgacggccgaggtcctctgccgttaggtcgcgcgcacctttgatcgtgccgaggcagccctgtatcatcgaggccgccgaatttgacagcggtgggtcagcaggctgatacagacgaggcggcgcagcaggggtatgtacgacagtcgacgccgagcgtctgcaataatgccagaaagagagagagagcctgagcacaccttttctccgcagcggcaggcaaacggtcggtccatgtgccactcggtagacgggtagaagaaggagaggacgtcgccctttgcgagtggccggagggcgacaacgcgccagtcgtcgggctgcgttggctcgccggccgtccggatctggaaggcgacgttaggcgcacacgagtggttggtatagagcagggccgagttgagctcgatgtggtcctttggacctggaccgacctggacggtcgagtaggccgtcgggcctctgcagaggcagacaggcacgtggcagagcgttcaggtcagcgacagcgacgagcacctccagcggcacctggtccaggctagctcgcgaggatgcaccttgtccagccctcgatattgcagagcgtctcaccctcgtcaaaggcctgctcgacgacaaggaagcgctctccgccatccgggtagcgctcgacgcggagcagggctgggtgcgactcgagcagctgcgggtcgagcgggtcgaggatgggggtcgtggagggcatactgagaaggtggatgcgggaaagaggaaagtcgtccgcgtcttggctggtgtttaggtgtcgtccgagaggcgaagctggaggttgagagggaagagagaggatggcgggctgacggccaagagatgggcttcgacagcgggtgcgaccggctagccggccgcggaagaacccgacaagcggtcgagtctgcttggaaagaggcggcagcggtagggcaaggttgccggaagaccaaaagtcggtcgtctgcggactgtcagcagcagtctggcctgtcttgctgcctctcgcttggtccgaggagagggaagccgatgttgcgtcgggcatgtcgttcgcaggcggcgcggtcgcagccggatgagctcgagagtcgccaagactatgtgaggaggtatccgcctcgatcacgaaagcaagtggtccccaagcattgtcgaactccctgtcagcctccttcagtcgtgtacgtccgctcagactgctcgagctacgccgtcgggccgaagggaggtgctgcgcatcctccgtcggagggtcgtggctagaagctcgtttgccaacgcacggccgtccagctcatcctccgacgtcgaccggcctcggggatccatctcgcaaacacgacacgcctgcgaagaccgatggctgctcttgcaccccgcccgctgcactggctcgtgccggcgacggtcgtgcccgttgctgctggcttgatcgcccatccgctgctcgtcaacacgccgcactcgtttccggcgctcgagatctcggccggcttctcgctcctcgccttcgtcggctgcctctacgtcgtgcctacgctcgggccggcttttgtcgccaagggcctcagcgggcgcgacatgcttaagacgagcgatgcccaggtgtgcgtgtcgcctactccgcgccatcgcggcgagcttgggtcggcgctgaccggatccggcgcgtcttccctcccggcctcctcacttgcagcccagagacgatgggcctgccagcggcatccatttatatgctcgcgctcatgctgttcatcccgtttccgtttacggtcaactcggccatgggcctgtccaagactgggcctttcccgcacgaggaggtgcgtcgcctatgcgtccggctcaagtctgctttctgcgaggagctgactgcctcaattttctaaccgcagctggcgctctacctctcggcgctcctctcgctcttgacggcaacccttctcggactactcgacgacctgtttgacattcgctggcggcacaagctgccgatccccatcgtcgcctccatcccgctcctcctcgtctattacgcccagggtggccttacgacggtcgtcatgccaaagggcgctcgcgagcttctcgggccggtcgtcgaactcggtgagggcgaacttcacgcggtcatgctgctccagcgtcagctgacgttcgtgcgagtctccctctccaggcccgctctattacctctacatgtcgctcttgtcgaccttctcgaccaacggcatcaacatccttgccgggatcaatggcatcgaggtcggccagtcgctcatcattgcctgctcggtcgcgctcaatgacctgctgtacatgccccttccgcggatcgtcgtgcccggcattggcgagctctggcaccaccagggcatgagcctcctcggcgtcatcggaggcgagcagatggtccagcgccacctgctcagtctctactttatgctgccgctcatcggcgtctgcaccggactcctttaccacaattggtgcgtcctctacttctttagcctcgcggcagaagctgatctcgcgatgcggcacacaggtatccttcgcgcgtcttcatcggcgataccttctgctactttgccggcatgacgttcgcctgcgccgccatcattagccactttccaaagacgcttctcctcttcttcctgcctcaaatcttcaattttgtgctgagctgcccgcagctctttgggctcgtgccttgcccgcgccatcgcctgccaacgtgcgtcacctccctgcacgatctcgccccgtccacctgctcggatcctgatcagatcgtgccgctctcctctaggctcgacaaggcgacgcacaagctcctgccatcaaaggcaaccttcccgcccgccccggcgccgcctccgtcgctgcgaaccatcctctcgctcgaactttttgccttcctccgccttgtccggctcgagcgcaatgtcgacctcgacccgactgccccagacgggtcacgcattcggagcacgaccaacctgacgatcctcaagtgagtggcctgaggcctctttcacggcacgacgcgcgcttcaactgacacgcaagactctcgccagctttctcctcgtccactttgggccgctgcgggaagaggctctcacccagctggtcatggcaatccaggtgcgtctctgatcgggtcggcctgcgcccgcagttcggcagctgacgcggcctcggcacccacaggtcggcggctcgctcctcgccttcttcatccgctacggcgcggtccagctgctctacgacggcgatcggagatagatgctccgtttctctttgaccatgcgaacgaggagggcgactgcggcgaaggggacctgcgccgggaccgccgtcggacgcggtgggccgagatcgccgtcgggggcttggggagcgggctgctgcgccggggcggccggcgtctctcttctttatctgacatcgttcccttttcaacctcctcctctatcccctctccccccccccttcttcttaccgaccctaccgaccattcacaatgaggcctcacggcgaggttagtacgatgcagacacgatttcagacgggggcgagcgctggccgtttttaacccaccgtcacgctcagcccccgctcgagcgacgagctgacatgccctccgaacgtgctcctctcctccctccgaccagggctcctgggaagagtttgacgagcagcgaaagctcaatacgacctcaaagtgggctctccaaacagccatcgtcgctctcctcgccttcctcgccatccgccggctggtcggtgtctggcgggtcaggcgggccgtgccgcgcatcggccggctcccgacgaccgcgtcggctgacggccaccgggcagacgagacgacgaccgcctgctccgggcctcgacggacaagtcgccactggctccggcacctcgcggcgagacgggcctcgctcggctcctgggacttccggaccaactggggcatgatggcgctctggctgctctgggccgcctaccagattgtcatgacactcgtccgtccttcccttgcctgtcgcggctcactgtgccggcctatggctgactcgcccatcctctgcctcaggtctacaccaaccccaagcagcgggcgggcgtcgctcacatgcctgcggcgttctggcgttacgctgccaaccggtgagcacactctgggccagttccgtccgcatcttccctcactgacgaagccatcttgcttcatctctcaaccagcgccggcaacctttgctttgccaacctgccaatcctcttcctgctggtctcgaggagcagcctcatctgccgcatcaccggcatcgcccagcaggtccgccgaaacttacccgtctctccatcacacaccgacgctgatcgccgacctgttgtcttctctcttcaggacctgacgtggttccaccgctgggtcggctggggtgtcgtcgcccttggatcggtccacgtcgttttctacaccgtctggtacatctgccttggcaacctctgggaccgctggaaggacggcctgcaaagcaagctctggttccaggccggcttcgttgccagtacgtcgtcagcgttctcgcctgccgcctaccttccacccgctgacgagcatgcgctgcccccagtctttggtttcattgctcttgccgtcaccagctgccgctggatgcgcgagaaccatcatcaggtctgttaccctggttggcctcgcagatccgcccgacgctgacaagtcaccgtactcaacagctcttcatctcgatgcatgttggttgctcttttgtctgcctgtgagagacatagaagcttcgcttggcttcatcagaagctgacgacctaaccccctccttccttcagcggagcctgctatctgcactggtccccgttcggcggctggccggccgccacattcttcgtcttcaccagctcgcgcggactccggatcatcagcctcctccggaacggcatcatgtcgcccttccgcaagtaccgcgcggacagcttgcccccctctgtcgccctccggcaaagcatcggcggcccgcatgcaaaaggggccttcttgcctgcttcgctcgagcggctcgacgagcgctgcgtgcgagtgacggttgagtttcctggcgtgtggcatgcgggcgactgggttaagctcagctttggcgacaagggccttggcttctaccagtggtgcgttcgtttcagtacccgcgagagacctttcggctaaagctgatactgtcgacttgcgtcttaggcaccccttctcgatttccaacacaccaggtccgctgcccaacacgcacggcacgccgccctggaagtatcggtcgacgatgacgcagcggaacgacgacagcggcagcttctcaagcaacgagtcgaccttcctgcttgccccggccacgtcgacaccggccaacgagatgatctttgtcgtcgctgcacacggtggcctgacacgcatgctgcacgaggctgcgccatgcaaggtttcggtcctcgtcgagggcccgtactcggtcccgcacgacatagcctgcgacacgctcgtcctggtcgctggagggaccggtatggcgctcgtccaggccatctgggagggcatcgtcaagaaccccgagtcggcggatcgtccgcggcgactgattgtcgtttggacggtcaagaagctggccaactttgactggatcccgctccaccagctgcatgacgcaacgcctcagaccctgctcgatgccgacgacctccatctccactacacgcacggcccgacggccgaggaggccagcctcggggtcgaatcgcagcctccgcccaacgtccggctcggccggccggtttgggacaccctcctgcgcgatgccgaggcgcactcgcgagggcagacattcgtgctcgcctgcggcccgctcagcctgacgaatcagatcaccgacgccgtcctcgacatcgcgcgaggaggcggcgacatacgcgtcgcggtcgagctcacctaggctcccctgaccccttcaatctctctaggacgttattctttctctcttctttcgcctctgcttctttgacgacctcccttcctgcttgcgcctcttccttcttccttttactgtaacgaaactcgtcacgcccttcttatctttcgcccactgtctcctaccgaccgccaaatgacgatgatctgcccctcctcccgctaatcactggaccgccgcgaggtcgatttgggtcaggcggtcatggttatcgtacgacagggcagcaggcgcggggacggggaaggagagatcgagagaaggcagtccatctaagcgagcgaggtgaatgatacagtcgggaacaggattgagacagcgcaagatgggtacaatatgattcacgagaaggcgtgttttttttttgtttgaaaaaagatgggtgaaggcaatcgaggacaaacggatcgatcaaacagtgctggcaccatgcccctgatcctcgccgagcatgcgctccatgctgtcgacggcggcactctgccgaccaccgccgggcgggccgagcgctgaggggtcggctgcggcggccgccctgatgttggcctccgccgagtcgtcgtcgccgacgactgcgccggcagcagcagcagcggcaggaacggcttcggcatcaggacgtctacgacggcggcggcgaggcagggtgctgggaaggcagaagagcaagagtcgtcagcaagcgggctggtgcctgatcttagcaacgggcaagacgcacatgatctttggcatcggccgctcgtcgaggtcgagcgcgacattggttgcggcctggaaggcttcgatccaatcaacgacctctttgggcgagcccgtctcaatcaggaactgctcgccctggagccggacccggacgacattcttcttcttgacgtagtcggccgcaaggccgctctcggcattctggagcgtgtacgccttgacgagctgattggaaccgtggaagggcaggtgcgctgcgatggcctcctttgggccggggtgattgctgccgctgctgacggacgagctccgcgggacccgaacgacgccctcgccctcgtcgaagcgcatcttgaccgtctcgggcacggacgaggacgaggtcgtatacgaggcggccgaggatgagagggacgcctcggaggacgacgtgcgagagacagcactcgttgggacgacgcttgccgaggagcccgagacggatcggacagaggtgtcgacgactgagccccggcgcgagccgttgctggccggtggctccgagggcgcccggctcggcacgctggtgctcggccgacggttcgaggcgtcgctactccgtcgcgaggcgtcgctcgcccgacgagccgcagggtccgaggcgaggacaatgggcggtcgaacctccggcgcaggcacgcccggaaagtggacgtgcggcgcgccctgggcgacctgggcgatcgcctcgcccgtgtactccttgccgtcagaccctcgaacggggtggcgtcggatgtcgtgcttgtagaccttgagacacgtgccgtggaggactggagaggttgagggagagcgcaggcaaagtcagacaagccgcctccaaggataaagactacacgcgaccggcgcaccaaagtactgcctcttccaggcccgatcgcgggcttggacgcctggcgcggtaaactcggtcttgcggggcaggtagccctcgatatgaacgttgcacgtgtagcttggcagcttctccttgccctcttcgtcccgcggccgtggaatcgaactccccggtccaggtgggctgtagtccggaggcggtcgctgaacgtcgctcatcgagttgcgccgccggacgcgacgcgtctcgacggccggcgacatcggcgggggcggcgacgacggcaccttgggcgacgtcagggcgaccgccgagctagccttgggcgacgtcatcggcggcagggcgctcgggcgcgcggcggcaggcagaggccgaggagcggcaatctggccggtcgatggaggcggcagctccagcctgcccatcgtgccgcgaagccggtcgcgggacgaagccaggtcgttcgagtccagccggcgatcagaggggcccgagagattgatgaggctgcgcgaggcctggtgataaagactgggccggaaggcctcttgcgaggcggtcgggacacgagcgccgggcgtaggaggcgccagcatgacgaacgactcgtccgcaccgccggcaccactcggagagacgtcgggcgaggcatcgtgcgagtcgccgctgtcgccgtccgtgtcgctgtcggagccgtcgtcggtgacgacactcttggaagtcagcggtacctcaatggtcgggccaagcccgagcgacggcgatgactggtttgggatcgccatgctcgcggtctcaacggccggggcggctgcagcagctgcagtcgtgccggctaagtcgacctgccgttccttgcccctagtcgacatggtcaggccggccggcgttcgtgcttgcggcgtcttgccgccctccggcgctgactcgggcacgacctcgaagtagctcgatacggcgccctcacctccctgcgctcggggcgtccgcgtcttctcggccacgctcggggtttttgctctggccgccgctgcaaacggcctcggtgggccagccgacaccggcgtgaagccgcccggggtcgggcacgagaaggtggcccaggcgccctcgggcgcgaaggccggctcggttgatggcgtcggcagcgaccagtcgaggccaacaaaccgatctgatgcagtcccgccagcctgagccgtcgcagacgacgtcgctaaaggaggcagtcgaggccgctgggtgacattgcgccgatccgagagcggtaagggcggggaaggggtcgctgcgaggttgcgccggcgcggaatgtctagggaaagggaccgccaaggtcagcgagtcgcacaagcacgttcaggcttgcagtcgataccgaccattgagggtgacgtcgtcaagcggcaggctgcccatctggtgcgcctcctcgtcgtcgctctcctcgttgatgctgtcgacgctgatcgagctgactgacgcccggcggccgctgccggcactcgttgtgcccgaccccggctccggctcatcgtcgctcgagcgctcggccgtcagcgcctcctcgtcagagtcagactccgagtcgccgtcaccggcctcgccgccgtcgtcgtcctcctcgtcggccgtttcgggcccggggaagtaaccgctcgaccgctgacgagcgccgttgacgccgggcgttgccgagggcgtcatgagcacgcgcggcattgaccggatcgtccgcatcggatcctctggctgggacgccggcgtaagaggcggcagcgtcggcaggttggcgatcggcatgggctgaggcgtccgccgcgggagagccgagacggacgatttgcgcgactgcacgcccggtcgggcaggagtcatcggcggcgggagcccgtcgctggccggtccaccgttggcgaagctcgggccagagtaggacacaggcgaactggcgagcgggtcaaagtcgaggttgagcgagttgacgcgcgacggcggcgtcgggagaaaggacgacgtcgacgaggcaactgttgtcagacgaggcgagaagatgaggggcacgtcggcgagcgacggccgcttgatcgcgagcggccgcggcgtcgccgctgggtccgggatcgcctcgaccgccgtcgagtaggtgtcaaggctcgaggtcgacgaagcaagcggattgtgcggcgtcgacgaggcgccgaggacgatgggaggcgcccatccgagcgtctcgcgcccggcgtcgatcgtgcgcgtctgcgggccgggcgagctcgctgcggatgacgaaaggagcgcggcgagagtcgtgtcagcccgcaaggccttccttctgaccagctgagagacagggacgcacgagtgagggcggcgttgacagctgacatctggtcgtcagagccgaagctgctggcgtcggcaggggctgcgggcctgccggccgagacccgggccgggctcgactgcatcgaagggttggacgaggttgaggcctgactgccagagccgtcgctgccgaggtcgtcggtcgtcgggttcaacggcggacgcggctgcttgccgtgatggaaaccgagaggggcggcgctgagcggagggatggtcccttggaggaggctcttgatggccgactttgcggggagggggttggcggccggagactcggccgcgggcgacttgcgagacttgttagagagcgagttgcgcttgaacatcgaccggcttgggtagacaaagcccggcggcgattgggaaggctcttcgagaccggttgggacgtgcgaatcaggaggggtgcgtctgacgcttgcttgcttgctgggccgggtggagggctagtagtggagggcgcggaagaagaagcgtccgctttgggctagcgagcgagagtcttcttgtaggcaggtccactaggcggcagacgagctgcctccagagacacgagcgatgccgagagaggaggaggcgaggatgacgagaccgggcaggagactggtcagctaattcgagcaaacggcgtgaagacgggctagctcccgccgaaagcgtgcgtggccggcttgcatccggccgagcaggctcagctctggccggccggccctggcgagggcgagcgacgggacgtacgagcaagagcaagcctgagcgaggtgtcgaggaggtcgaggagcggatggcctgctggtcggagagtgcaaaggacgagccggagagcggggcggaccgtggcacggggcgctagatcgaggggcgcccgagagatgatgagggctgcgagagagagaggaagggggggcacctcgccgcgtcgtaagccgagccggtcgagttgaggtgacctgctgctgacggatactgctgctggcgggacaactacgagtgcaccggtccgtcctgatcggagaagggggctggcgaagagagtcgggaggagagaaggccaaggcccgttgctgctgaaggggagcgtgccgtcgtcgtcagttcggccggtcggcttcgattggtcgccgctctcattagccatgggctttggacccggaccagcggagcacttctccaacgactctcgcagccgagcaaggcgggacgagacgcacctagattggaggagatgctgcagtagtgtcggaggtgcgaggagggtcgaggctgaggtcgaggcgagcaagcaaagcaagctggtcgacggacgactttggccctccgcagcaagcctttcaatcagcccacgacgcccagccctttttcttcccgacggcgccgagatcgaagtctcgtctccgacgagtggctgccgagagcccgccagccgggggtcggcacggggttcagctcgacgctcgactccaactactgctgacaatcatcgaaagctgctgctgcaagccgccgccggcaacggaagcaggccgctcgctccgcagccagcctctgctcgcccggcccttttcctctcggcagcgaccggatgcgaccccgctccccccatccagaggttgtccagcccggcacgtcccgagcgaagtgcggcagatgataaacgagctcatggtggcatacgaagagtaacggggcttttcgatgccgccagagcgtcacacaacgggagattctggcaagagagagagagagagagagagagagggagagagagagggagagagagagggagagagagggggtgctagatggcgggtgggacaacggttcgcgatggcttcatctcaccattaaacgggagaggagaccaggattttgtgaggctttgatgcgagatttctagtgagaagaatgacaaaggccgtacagaggcggcgggaccaggacggagagaaagggaaattggacttgcgggccatctactcgtgatgccatgagttgtgcaggccgacggtgtcgttgggcgtttgcggacctgaagcgacgaacgcgcccgagttgccgttggcaaggccgatggcggcgtccgagccgtctgcaagatgcggcagagccccggtcagtccttgacagtcaagcggcatgatgagcaaggcagacgcactcatcggtcctgagcagccggtcggggcctcctcgacctcgcgcacgaccttgccgtcgacgagcgcgccgacagaggcgccctcctgcttgagcttggcattgtcgttccgaagctcgatgatgctgtcgaggtaggccgagctgacctggccggtcacgtactcgcccgtgaaaactgagcattcgaactggtcgatcgacgggttgaactgctggcacgacttaatgagatcgggcagcgtctggaaaatgacgaggtcggcgccaatctcggccgcgacctcagcctcggtccggttatgggcgacgagctcgtgcggcgagggcatgtcgatgccgtagacgttcgagtagctacaggagccggcagaggtcagcgagcggcttgacagggaaggacaaagcggtctccggccgactcaccggatcggcggcgcgcacgaggccatcatgaccttcttggcgccgacctcgcgggccatctggataatctccttggatgtcgtgccccggacaatcgagtcgtcgacgagcaggacgttcttgccggcaaactccatcggcatcgcgttgagcttgcggcggacattcttcttcctgcgaagggggagacgcgataagaaaaccgtcagatgctgttgcgacccgacaggaggttttgactgcgccacacaccgcatctgctggccgggcatgatgaaggtccggccgacgtagcggtttttgatgaagccctcgcggtacggcagctggagccgctgcgcgacctggagggcagcgactcggctggtctcgggcacggggatgacgacgtcaatcgtctcgccatgggcctcgagctgcttgcggacctcctcggcgaggaggtctcccatcgccatccgcgagcggtagaccgagatgccgtcaatcgtcgagtcgggccgggcaaagtagacaaactcgaaaatgtcgggcgcaaagacctgctggggcgcgcactgccggcgcgaaatgcccgaccgggtgacgatgacggcctcgcccgggccaacgtcctgccagtcgctgaagccgagggcgtcggcgcagatcgactcggacgcaaagaggtaatccttgccgcccttctcgccgtcgcgttgggcgaggccgaccggacggatgccgttcgggtcgcggaaggcgatgaggccaaagccggcaatcatcgtcgtgcaggcgtaggcgcccgagacctgcgacatgaggtcgcggatcgcgttgaagatgtcctcctcgttgattcggaacttgcccgtcttctggaggttgttggcaaagatgttgagcaggagctcagagtccgagtcggtgttgatgtgccggtgggcgtctgagtcgaggaacggccgaaggtcctgcgtgttcgtgagattgccgttctgcagagagaacaaaggcgggcgtcaaccttgagctagactcggcggcgcaagcacagcgccaaaggggactgacgtgagccatgacgatgccataaggcgagttgacgtaaaacggctgggcctcggcgtgcgctgacgagccggccgtcgggtaccgggctagcgtccgtggcaggaggatgcgtgtcagtagcaaccacggtggtcacgcgagcgctcgcagcagcgagaggtcgcaccatgaccgatgcccatgaggcccttcaggccggcgacagcccgcgtgtcaaagacgtcacggaccataccgttggccttgacctgtcggcggcgagtgggacgaagcgaaggcagggtaattggtcaggaacgagccaagagggaagcacggagcggcgccggccagtcgagccgaccatggaaccagccgagacggcgacggacctgataaaatcgaccgcggggcgctccgcaggtgacgataccgcaggcgtcctaaggagcagaggcagatacacagggagcaagcagaggaggggtcaggatttagccgacgggagccgaagcaggccgactggggggggagacggacctggcctctgcgcgagcgagcagggacgagaagggaagacgagagggtcagcctgaggctcgtgcgacatctgccaggcttagctcggaaacttccgcccgagcacgcccttcaggagggttgagaacgtaccggtgctggaggagcgacaggccttcggcgagctcggtcgcagccgccgaagtgtaggcggcctcaatgtcgttgaggagcaggccgatgatgccgcacactgtcaagagcgcgcgtcaggttaacgccagacttgacgcagccggctgcgaagaacgcactggtcgccgcgttgcgttatggagaagaggagaggaaggtaaggatggatggatgggagggctgagtcctgagccggcgctcgacatttgctggccccgaaacgacttcggacgcagaagcgggccctcaccccgaacgacgacgaccagcagggctctctctctctctctctcgagacgatcacaagcggccagcaaagaggagacgagcagcagcagcagcagcagcagcctcgatgccaccggcgccgtccgtgccgctcttcgtccttcggctccactcggcccagatcaacgcgctctcgctcgtcctccccgcgctcgaaccgcagccggccgagggaggcagcagtagcagcagcgcacggcctcggcctcgaccgccggtcctctgctctggcgatgctgacggctgggtcgctatcacggacctggccagccgacgcgcgctggccgtctggcgggcgcacgacgacggcatcctgggcgtcgagcagctcgccggcaggcgcatcatcacgtctgtctatcgtcgagcggccgctctcaactcgtcggctcgcatgacctcgatgctgacctcttgatttctacctttgactcctctcagctctggccgcgacaacaagctgcacgtctgggccctgccgcctcggctgccgacgctcggccggctaagcgcagcggcctcggcgccgccgatgctcctgacgaccatggacgtcaacagcctcaactattgccgcttttcgatcctgccctctttgacgagcccggaagaggcgtggattgcgatgccaaacttgactgattcggagacggttcgtacggagttcgacgccttgattgccggagactgcgctgggccggctgaccccctcgtccgacctgtacgccttagattgacatctttcaccttccgtcgcaactccggcctcacgctgctatcggtttcgatgctctgctcagtgcatcctcgaccctcggccgaggagccaacgaacccaacaagacaggtccgtctccgccctccgcaacaggcaccctcgttgctgactatcgacgtcaccaggcctcgttatggcgatctacctgatttctcgcactcggctccttgccggctacgagtcgggccatgtcgtcctgtacgagtacgagggatccgccgagggcgtgacggatgcgcgcctgcccgaggtcggcagctcggacggaaagtcgggccgcggccgctgggtcaagcgctggaagatcaagggccatcacgaggcgggcgagtgccattcatcttcgatctcattcctgggcgaggtcgctgactcgcctacccagtcatgagcctcgcggttgctccagacggcagctttgcgctgtcgtgctcggccgagcacctcgtcgtcaagtatctgctcattgtacgtctcccactctcgtcagtgagcgctggactggccagctgatcaagcttgcggccatcggagcgcaggacgaccttggcgaccagccgcgatcgcaggcgttcaagacgaagcaggtcggcaacgcgtcgatctcgatacacgcctctggacgcgtctgttctgtcggtggttgggacggcgcgtgagtcttctcgcttgtgcgcccttgagctttggccgctgacgccgacaacaaaccgcttggccgggcagtgttcgactctactcgaccaagggcctcaaggggctcggccgcctcgactaccatcgcgacacgtgccacgtcgtcacgtttccgactttcagacccgcagacgagtccgcgtcatccttcgcagcggagacgggcgacggcctttcagacgacgccgatagcgactcggacgatgacggtggggttagggcgggtgcaacgaagcctgcattcgaacgctggctcgcgaccggcggcctcgatggtcgggtcgccgtctggggactgatggacttcgagcgcaagggcagcgaatgatctctatgcgcctcttctttgagcctactttttgtcggtcggtcggtcggtcagtcggtacgtcctgtcgcgctggcaggtggcggccatgaccggcggcgccgagagacgacggccgcagccatcaacatcgaccctccttctttgccttcctctcgccttctcctagacctttctctatcgctcgccaacgccatgccgcccaagcagcagcagaagaagcgcgtgtcattctcgagcggagtcgacgtgccagatgacctgctccatgcgccggccgtctaccggcacccggaccccctgcttcggcggtgcgtccggccgaccttccctcccattcgcctgtgctgggatctggctcgagctcatcccgatcacagtgggcttggcttagctgccaaagctcgacatcgctgggaggcgtattgtctgcggcggactgcccgaggctgagaacacctccaccacctgctcccgcctattgacaggctgcggctcgaggacgcggccggcgtacccatcaacgacatcaagacgcactttgccggcaagaagctcctcgtcctctactttggaggtgcgttcgggtcttccagagcagctcctgaccgcctgctcgacttgggctgactagtctgtgcgatgcgatggctgcgccgcgtaggtgctttcggagaagcctcgctccgggacttccatcgcgtgagctggctcgagagggcttcgggccaccggtccttgcaacgcgctgacggccaccgcctctcttcgttctccaggatctggccgagctctccatgaaggagaacaaggaggttgccgtcatgtcggtcgccttcctctcgtcgccgccgagctctcgccgcgggctgaccctcgtcttgaactccgacccagctacgtgtcgacagatgtcgaggagaagctcatgaagggtgtcctgacgcacaagccctggctgcggatggtgcggccgcttgcctgaagttgcgagatcccagcatagtcgagctcgctgacctgcgtccttcctcacccaccctgctcgacgcagacgttccatgacggctccgactttgcgccgatcgctaaggcggcaccggcagcggtgactgagctccttcgaggcgaggactttgtgacggccgccgaggtcgagaacatgcagtacgacatgccgacagagggctacgaggacccgctcgtgcgtgtgctacgcctcgacatctcatcgtcccgggggggcctgaccggcgctcttcctccgtacaggagtacgagtacgtgcggcctctgtcgcgtgctggtctgaccgcccatattggtgctctgcgcacgccgacggtcaccgtctagtgcgtccctcagtcgcccgtctagggtctcaattgcgacgtcgctgacccttcctctcggcctgcgcttcactcgccagccaccttccgacgcatcgcgtcgtcagccggtttgcgaccaaggagaactttcgcaagggtgcgatcgagagcaagctcgcgctctggaaagacggtcggtcgactggcctcacgttctacggtgcgtgcctctgccgtctctagccgctgtcccgctgctgaacacctgctcgccttacttctagacatccgggccaagatgaagtggacgctcctgctcgctcttttcgccatcttttatcacctcgccgtcgcctaccttgggtgagcatcgcccggcgctggtattccagcccggccggtcgaagctgaccacccccccctttcacccatccagacccgagtggaacgtcctgccgcagtttgtcgaccgtctcttcagcggccaattctttagccagcccctccctggcgccaaggtcgccgccaacgatgctgcggccctggcagccgatccggctgcggcctttgcggcctcgctcgtgagcgctgctcgagtcgcgagcgacgcggcgacgcggtcaatagccaagggagcaaagacgctgccgaccgtctctgtctcgaaagtgatggcatgacctggcgttgactggaagggaccagaggcatgcgtgtcgtcatgagatcgtccgtgaaacaagggacccaagggagaacctcagccgctggaagggcagagcagagagaacggttggtcaacgtgccccctcactggcgctcgggcgagaagggagacgcaccggttcatcgtgttgccagccccctttgcattctcctcggtgaagacagcccagctctcgtccttctggcgctttgtctcctcggcttcgtccgcgccgaccgtgccatcctgctccatcgcgagttgaagaatttcgttcgacgtcggcgcatctgctgaggcttgcctgcgaagcgagcgggtcgagcgagcaaagtggtcagtctccttcgaagctagaggtcgccgacgggaagccgcaccctccgccggtgatgacacggccggtgtcccactcgttcttgaggtagtcgtcgatgctcatcgtcggcagccggtggccggcccggaagacctctgactgcagcctctcgcggtcgtccatttcgccgcccgacggcaggattgtaaacggccgcatcggctgccgggcgagggcaaggtagagagtcagctgccggaaccctcgccaagtgtcgacacggagcaggctgcgtacctttccagaggggtccattagaggacccttgccgtcgggtccgccccggttgacccgatcgagcttccacgaccggtccacatcctcgacctcgtcgcgctcgcgagcgcgccggtcgtctgcgcggcggtcgtcgaggtcgtctggcacgctctcgagcaggctccgctcctggctgattgactcgacttgcgagagcgcctgggcgtacaggacggccatgagcgcgagaatgtaggaccggagcgactcgggtgctggggcagcgtcgtcgccgtcgtcggcagccgaaccgataggggcggcggggaggagcgcatggatgagcgcaaagtcgtccaacgtcgacgagaggacgtagctcggctggctcgttgcaaaggcctgcgcggagagaggggagtcagcgcccgaccagacggcgacagcataacagactcctctgacggaccctcagcttctcacggatgtccttctcccagcgaaactgcgcaatcttctcctctcgtcgccgagccgggtcggtcgtccctgaccgccggagcttctggcgctccgactcgggtacgacgccgtaggcgtcaagcagactgatgtacgactggaagctagtctgtttgggacagcggtcaagcactgggatcagcccgggttctgaccgcagctacgctcgcgagctcaaatagctccacgagcgctttctccgcaggcagggactgacgtcggcctcctgcaggcgcttgagccgctcagcccgatcgtcggtcctcagccggccgacgacctcgcctgcgacaaagtcgacgagcatgaatggcaggccctgcgagctgacgtcctcgagcgactcgttggcggagaagacgccgcgggcgcggaggagcgtctgagcgagcgtcagtgcgtgcgtggctcgggcgaggagtccctggtgcagagagagttcacagcagcagcagtagtaaggagctcgtcagcgcctcggagcgtgttcagcagcagaggcgggcagagcacccacctgcgtcacgtccgagttggtcggcaggtcgttcgcgtcggacgcggccgagagtgcccgggcaaatagctgcgagagcgagagcgcctggagctcctcgcggtcgtcatcttcgccgtgggcagacatctggagagagcgtgggagggcgtggcgaagttggggtggtggtgatgggttcgagggagctcgaagttgacgatggagggctcaagctgacacgcgcccgcgacgaagagctcgcgcagacgcccgctgcgcttgcactcgctctcgctccataacgacactccacatgcacccgtcggatcacgacttagcgagacgagccattgcttgcggtctgaacgcggggtataaagttgtctgcgctgatcgtgctggagcgctgagaggagtaggaggtcggcacatggcaaccgctgctgcgacaggcgagcgtgacaaggacaacaggcattcgttcgatgagaggcgtgcagttcgtcaaggtgtctacaaaggagggcgagcagggcaacagatggacaggaagggaaggaggctgtatgagcagagcagcagatataggctctcaagtcgccgtcgcttgaaatgaaggcagcagcgtctttgcctgcgcagtaacactactgaggttgagattcggattcgtctgcgagcattccaccgatgagaaggcaggtcagcagctgcataaccagattaagcgcacagggaggtggacccacatcgaggacgtcctcgaggcccgtctgaaaggcgttcgagacgtcgccccggagcgtcgtcagactctcctcggcgacgagaagcgattgactggcaagcgaacctccggctgtgaagcatcccatcgggtaagtacgagcgacgccctgcagggaaggagacggagagattgcgcacctgcctcggcccaaccgagtgaggtaacactctctgcgacagcgagccggacgctcgccccaagtccggccacggctgagccgctcgtcgctccgactgtggcgagctcggcgccggccgcacggatagggttggcggcggacgctgccgtcgtcgactcttcgagcaggagctcgggtccggccgagtggagggccgtctgacgggctgcagcgagcattgtcgcgccagaagagaggagggccttggacgccagcttgtcagagatgcaagggtgtctggcagggatgggaagcggcccgccagggcgactgatgctgggtggtggatgtggtttggtggtgggcaggagaccgtcggtctctctgtctctgacgttgcgtcctcggaggcgagagccgtggaatcgagacgagcccaaagcggtcccaagtcggggctcggagcttggaagtgggctaagcgcggcggcgagtcgaccatcttgcttgccttctccgccgactccccgcctaactctcgcctgacaacccttctctcagtgcaggagcatgaacaacggatcatggccgcagccgctcaagtacgtctacctggctttgagcgcttatagccgtacagggcctgacccgcctaatcgctcgctcgcctcgcgtgcgccccaggaactgggtccagcgctcgctcaaggaggcgctgcctgccaacaagggcaaggtcaaccaggagctcaagaaggtcatcttcgaggcttaccggaacaagacgatcgacctgaccgactgggacagctttgagctggaatcgtgcgtgttgccgtagctctgcgcaacggcagtaggcggcggcagtgacgggcgcgcagacgtgcaggacactgaccggttgccttacactctgaacgactcgagcgtctgcaggatcaggcagcaacgcctaacgaatccgacgtcggtagcctcgacgtcggcgacgccatcgatgccgacgcagacgaatgggaagcgcaagaagtgggtcaccctcgggcgtcggcgcgaggttcggctgcgcctgctaccggcagctaacctccaagagctccctcctctttacaggcctgacaaggacacaccgctggcaaagcggctcggaggcacgcccggctcgtccaagaactcgatcgttcgacttgcgttggtcctgacgagggaagcagctcagcgcagcgtcggctccggagctgacgaccgcctgcgccgccacccctctgcagtgagcaagacgaggcgaacgaggcccgccgcaaacgctttgcgcgcgagcatgagattgagatggccaagggtctgagcggaccccaggcggccgtcgtcggcgccggccacggcctcgtgccgcgcgtcgtcatgggcctaggggggatgaacctcaaaggcaagggcaaggcgatgagcggcggcggattgggctacgacgatctcgacggcgggtttaatccggttcgttcgattgagctgcgactgtctctcgacaggcactcatgctgaagggctgtctgcgacgcctgtcccgcagaatgtcatcgactgggacaagcacacgatcgtcgggacgtcgaccaagctcgaaaagaagtacctacgactgacctcagtgcgtaggacgttctcggcctccatcacgccctcgtgctgacttccctgatgccctcatgcccttaggaacccgacccgtcgacgatccggccgctgccggtcctgatccagacgctcgacttcctcaagaacaagtggcgccaagagggcaactacccctacatctgcgaccagttcaagtcgatgcggcaggacctgacggtccagcggatcaagaattatttcaccgtccaagtctacgagatccacgcccggatcgcaatggagtcggtgcgtcagaagccgtgacgctcaaactcgatcggtcggctgacgcaggcgacatgcaactccgagcagaaagatctcggtgagctcaatcagtgtcagtcagccttgcgacacctttacgagcacaacctgcccggccatccggacgagttcttggcataccgcattctctatctgctctacacccgcaacacctccggtccgtcaccgtgtctcctgcctgacgtacgaggagggtgggctgactcttctcgacggacggcagaactcaacctgctcctcgcacgactgacgcctgcccagcgcgctccggcctgcgtccaacacgcgctcaaggtccaccgagcgatgacgacgagcaactaccacgcctttttcgtcctctttctcgaagcgcccaacatgggcggctacctgatggaccactttctcgaccgggaacgcatcaaggcgctcggcatcctctcgcgggcgtgggtcccactcctcctcgaccgctgctcttctctgtcgtttccgttgctgacacgagccgcccctcccattacaccagctacatgtcgctgcccattaccttcatcgcggccgagcttgcctttgagacgccgcacgagacgacgaccttcttccgaacacacgagatcgacgcctaccagccggcgccgggcaaggccaatgcgcttggcttgcgcgatgacgaaaaggtctgggactgcaagggcgcttgggcggcgctcggcgaggcgctccgaaagacgatcaaggtcgacatcaagggccagctctaggagcagcgcgctttccctcctcgcttgcgctgttaggttatcagcgacccgtctgtcgcaagctccgtcccggccacctcgagagtcatctgctctattcagcctcgacatcgaacggcacagcaggaggcgctgtcgacagactgtcgggtgctgagcggcccccgcgtcttttcctgtcaaaggacccttggtaaggtgcgtcgccctttcctcccctcttctccgctagccttgaggactgactcacttccccttctcgctcgactgcaattctttttttccttggaccgcgtgccttaatttcctctctctgagcagtccaaggctgagcagtccaaggccgagctgcgagcgatcaacggggcactttctcgccgccggacaagtgcttccgggtatgagcctcctcccggtcggcaacaactcacctctcggaccagaccctagacgggcggcaacggtcagtcgagctgcctcatctttgcgccgacgtttagcttgcgtttttttgctccctctcgtctcttctgtctcgcttgcatcgcatgagtctgccttccgagtcatttttgattacgccgaagcgactcgtctcgcccagcccagagacttagacggaatcgcgccggctcaacctgccgcgcgcgcgccgcccgcctgcccgcccgcgcgcgcatgcccggccgctgctgctgctggctggctcgcggcgcggtgcctcgaagagatcgcttgacggtcgagcttcctctcctgacacaccctcacccacctcaccgcccgccatcgctttctctccagcatggtccgtcgcctctttgagcattccaagcgagctcatcgcctcgacaattggaagccagatgctgatcttgtcgctacctccgccgcggccgccccttgccgcgccctacctcctcccgccgtctgccgtcgcctccgcgcagaacgacgtcggtgacgaccagccgcaggccgggccgtcgacgcaggagcagcccaagcacatcggtcagatggacgtcgaactctcgcatccgaccatcaaggattgtgcgtgctcctcctcctcgctcgggcgtggcgggccggacgaagggggagctcggacggagagctcgacgaccggatagggtggggttgagcgttcggtcctcagccgtggcctgagctctcggcggtcgagcctgccggcatccggacgcaaggctcggcatgcatctgctggcgaggagaaggaggagggcgtgccatgaacgagagatcaagcagcccacgctgacatcgctccttgccccttgacggctgcctcgcttcgtgacgcttcctctcagccgaggcctttgcggccaagtatatgcccgacctcggtcaggagatcgaggacttccaggtccagacttggcggataaacaactggtcccagtcgtccaagcggctggtcggagccgactttggcgcgggcggccacaagtggtgcgtcgctcgagagactatggccaggctggctgctgctgctgccgctgctgctgctgacacctagaatcgttcgctacgctgtcccaggcggatcctcatcttcccccagggcaacgccaacggccagccaaacgacatggtctcggtctacctcgactacgccaacccaaagtcggcgccggaaggctggcatgcctgcgcccagtttgcgctcgcaatctccaaccccaacgacccgtcaatcttcaccgtgtcgcgtgcgttctctcctcccatcattgctcgtctcggtcggccgaggctgatcctagggcgctttgccgacgacagatgcccaccaccgcttcgtcaacgaagagtgcgactggggctttacgcgctttgccgacctgcgcaagctgcacacgccgcaggagggccagagccgggcgacgatcgagggcgacgaggtggacgtgacggcgtttgtccgcgtgctcaaagacccaacaggcgtcctctggcacaactttgtcaagtgcgtgccctccggccttgcccgctcgtgacctgtcgccgactgacgcgcccctctttctccatcagctacgactcgaagcagttcaccggctacgtcggcctgaaaaaccagggcgcgacgtgctacatgaactcgctcctgcagtcgctcttcttcacctcctacttccggaaggtgcgtcaaccgccctccctcgcgcgttcgtcgcacgcggctgctgacggccttgctttcgacctcttgcgcgcacctcaggccgtctaccagatcccgaccgacaacgacgtcccgagcgagagcgtcgcgctcgcgcttcagcgcgtcttctacaacctccagacgtcggaccagccggtcgggacaaacgaactcacgcggtcgtttggctggaagtcgctcgactcgttcatgcagcacgacgttcaggaattcaatcgcgtcctccaggacaagctcgaggagaagatgaaggggacgatcgccgagggcgcgatccgccggctgtttgtcggcaagatgaagagctacatcaagtgcgtcgacgtcgactacgagtcggcccggtccgaggacttttacggtgcgtgctgtctgccacgatcggctggggcgagcgctttgctgatgtccgctgcccgctaccctgcagacatccagctcaacgtcaagggcatgaaggacctgcacgactcgttccgcgattacattgcggtcgagacgcttgacggcgagaacaagtaccaggccgagggtctcggtctccaggacgcgcgcaagggcgtcatctttgagtcgttcccgcccgtcctccatctccagctcaagcgcttcgagtacgacattcagcgcgacgcgatggtcaaggtgcgtggtctttaggctcagtgtgagagcagggagaaccccaagactgatgtcggcccccttcgccccgctcgtagctcaacgaccggcacgagttcccgtacgagattgacctcggccagtacctcgacgagaatgccgaccggtccgagccctacgtctacaagctccacggcgtcctcgtccacgctggcgacctccacggcggccactactttgccctcatcaagcccgaaaaggacggcaagtggtttaagtatgacgacgaccgggtgacgcccgtcaccgacaaggaggtcctcgaggacaactatggtggcgaggtcctgacgccggccaatgtcaacctgccgcgcaacgccgctcggccggccaagcgcttcaccaatgcctacatgctcgtctatgtccggcagagcgcgatggacgaggtcctcgcgccgtttaccgagggcgacacgccgccgcatctccagaagcggctcgaggacgagcggctccagctcgacatgaagaagaaggagaaggaggaccagcacctgttcctgacggccaagatcatcaccgaccagacgttcaagggccaccagggctttgacctcgcgacgtttgaggacaaaaacattccggcctcggagctcgacaacttccgcgtgcttaagaccgagacgtacaagacgttcaagcagcggatcgcccagcactacaagtaccccgagcaccagttccggctctgggtcctcgtcaaccggcaaaacaagacggtccggcccgactcgcccatcgaagacatggacggcacgcagagtcagcttccttacctcgctgatcgcctccaggggctcctgtactgacagcagccttccgttcttcgccgtccggccagacatggagcatatccgcaaccagatggccaaccggacgaccgagctccggctctacctcgactttgagtcgcggccagagctgatccagtcggtgcgtcgttcctctgccacccttgcccgcgcttctcggcccaagacctgacgccccctgctcttgccccgcagctgcacgtcaaccacaacacgtacagcatgatctttctcaagcactttgacgtccaccaccagacgctcatgggcgtcggcaagatttacgtcaaccgcggccagaaggtcggcgatctctgcgcgacgatccagcagatgatgggctttccgtcaagcacgccgctccgactctacgaggtgcgaacgcccctcctttcgctgctcgtctcgaccggccgaccggccgctgaccggcgcctccccccccccccttgcacttctgcaggagatcaagcccggaatgattgagctcatgaagctcaagaacacgtttgccgtctcggagatccaggacggcgacgtcatttgcttccaggtcgatatcggccaggatcgcgagcaggacttccacgccaacaaccagatcacgaacgcgccccagttctacgagcaccttcagaaccggatcctcgtccagttcaagcccaagtacgaggacccggacccaaaggcgacgtttgaggtcatgctcacgcgcaagatgacgtacgagcaggtgggtgccgacgcgccgctttgacccggcatcgttgccccccttcgctgacagtcggtccccccgctgctagatgtcggcccgcgttgccgagtttcttggcggcctcgacccgctcaagctgcgcttcacctcggcgaacggcacaaacggctctgccaagggcatcatcaagcgctcgctcaatcaatcggtccaggagattctccacacgacgtacggcagccctctcgctgtcctcttttacgagaagcttgacatcagcatcatcgagctcgagaccaagaagtcactcaaggtcatctggaccggcgcgctcaacaaggaggaggtacgtccggccttcccgtcggcggcagtcgagggcgcgtgaagcctgaccctctcaccgcaactgcacacagggctcgttcccgttcctcctgcctaagaccaacacggtcgaccagctaggcgagcagctgatgaagcaggtgacgctctcacccgagggctcgggccggatccgcttcttcgagtttaccaacatcggccggcgcaagcccaacgacttttcgggctccgagatgattggcaacatcaacgacggcaacgagatctacgccgaggaggtcccgctcgacgaggtcaacctccaggaggacgagacgctcatctcggtcttccacttcttcaaggagccggcgcgctggcacggcatcccgttccgcttcgtcgtcaagcctgttcgtcgaccttaagcgcccttgcagcggccctcgtcatccgactaatctccctcccgccccgccccgttcgcagggagaaaaatttacgcagacgcgcgagcgcctgcaggcccggaccggcgcgaccgacaaggagattgccaagtggcgttttgcgctcattctgaccgagacctctggctacaagcagcccaactacatcgaggacagtgcgttgcccccttcctctgaatcgccgtgctttcgagccgacagctggctgacccttcacacccttcctcgacccaggcgacgacctgtcggtccacaagtggcagccgcagcatctgctcggcatcgaccacattgaccggaccggcaagtcgtcgcggagccaagagaaggcgatcgtcatccgctgaggatgcccttggtccctttgccccgccttcgccttctcctggtctctgcatcagcccgtttgcctgtctctctctctctctctctctgccctcccatcaccccgctgcacgtgcctgctctgtatccgtcgcccccctctttttcttcaaatgacgccttgacctgtaacctcttacgagatgatgacggggcgatcggcgtcgggtctcgggtctcgctttacggcgctctcctttcgtcggcgcacagacagtttgccgcgagccggcccttctgcctcgtcatcgacaggatgctcagtcgaggactccctcacccagctcttttcgacagggtgcaaggccgggccgtccctccggccggccggtgatgcgggtagcctcgactgcgcgcacggcggctgagatctcgcgagcttcggcttcgtgcgacggggcggcctgctcctcctcctccctccgacaccatctccttccataacctcatctccttccacccttacccaaacctttctctatcctcacctcctccacgcccctccgcaccatcttcttccgtcacctcatctcctcactccaacaccatctccttctgacaccaacagccgtggcaatgtccgacgtcaaagtcccctacgtccggctcggccagtcgggtctcaggatctcaaaggtcgtcctcggctgcatgagctatgggacgccaggctggcaggattgggtactcgacgaagaggcctcgctgccgcacatcaagcgggcgtacgatcttggcctccggacacttgatacagccgatgtttacagctacggcttgtccgaggtcatcgtcggcaaagcgatccgcaagtacgaactccctcgggagaatctcgtcatcatgaccaagctcttcaacccagtacccaatacaaccggcgagaagtatgcaaaccggaccgagtttgaggctgccgggtgcgtgccgctcctttccgagtgacaagctagctcgctcaccgaccttcgctccgcagctatgtcaaccagcaagggctctctgtgcgacctctcctaacgctgtcttcacctcgcctaacaaggactgactggctttatcgcagcggaaacacatcttcgcagcagtcgagaggtcgctcgagcggctcgggctcgactacatcgacctgctccagtgccaccgctttgatccagagacgccgatcgcagagacaatgcaagcgctccacgacgtcgtccggtcgggcaaggttcgctatctcggcagtgagtctttgacgtccatgtacgcgctgacaaggtgctgatatcccgctctccggacagtgtcgtcgtgctgggcgtaccagttccagcagatgcagacgtacgccgtccagcatggcctcacgcccttcatcagcatgcagaattactactcggcggcctatcgggagggtgagccttccgtgacgggccctcttccgcagcgaatcggtgtactgaccccattccctgacccttgcgccctgcagaagagcgcgagatgatcccttactgccgctcgaccggcgtcggcatcatcccgtggtcgcctctcagccgcgggttcctgacgcggccgatcggccagtcgactaagcgggtcgaggcagacccgggcttcaagggccggggttacgatgccccgcccgagtgcctcgtcgagatcaacaaggcgtgcgtctgcagaccagggcgcttgctcttccaagactgacccttatctgcgccgttaacgcccctttccagggtcgagtcgatcgccaaggcgcgaggcatatcgatggcccaggtcgccctcgcctgggtcctcgcccagccaggcgtctcggccccgatcgtcggctcgacctcaatcagccacctcgaagacctcgcggcgagcgtgcacattgagctctcggccgaggagattgaggccatttcgaagccttacctgccgcaggcgatcgtgcgtcctacgtcgtcgctttggctgtcgagtgcgcctgggctgacattgggctttccctcgtctgccccagaccggacatgcttgaggtcgctcaaggatgcgccgggcggcgcggctcctcttccgagcttcgatgcctctcgacctggtcctccctactttctctctgtccgcctgccgccgctgcgttcccatcatagtcgttcaatcaatgatcgctccttccccgcaacaagagaaaaacatccgagccccaacatcgtcgacccccgtcccagccagagagtcgcgctcagacgagcaaggccgagacgagcccgaaccggtcggcgttcgtcgtcgtcgtcgcgggtgggctcggccgggccttgaccgacggctgcctgcccgcgccgacggcgagcgcagcgacaaggcttcgggcggccgcgctgggctcctcggcctccgagacgccgctcgagccgccggcgatccggagccggagctcgcgcgcgcgctttcgggcaaggaggaacgacggctggtcgttggcattgtcgtcgtcgcgctccgtctggacgccgggcgtcgaagggagcccgtcggcgtcgtctgagtcgtccgagttggaagtgaactcgcccgacgacgcaaacgggaaagcagcgtcgcgctcggcctcggagagcagcggcgggcagctgtacatggcctcggccgggtagggctttgtccgccgacgctggaggctgccagccggccgcggcgggggtaggagggcaagcagcgcgagctcgtgcgcgcgcgagtaggcgtactttgccggcgggtaggatgacccgagcaggttggctgcagagcaagacggcagggtcggtcaggtacgatcataagggcagaatgagaggcgttggggacgcaccctctgtcgtgccaggaacggtcgccgccggcttgtcgtcctcatcctcctcttcctcctcctcctcctcctcgtcctcctcgcccgagtcctctgcgccctcaaacagctcacccttaccattgtcgtccccctcgccatcgtcgccgtcgccaccctcgcctccgccgccgccgatccagcggcccttccagtcgactcggtcgagctcggccccgctcgccggccgcatccggagccattccatccgcgggcccgaccgcgcacgctcagagaccttgaagccgtagatccgcttctggtagacttcgccaaacggccgcttgagcccgccggccgggtctgggttgacgaacggctcggcggccggcgagggcgcgctcccgttcggtggcggcgagggctgcgccgacgccgacgccgacgagggaccggcgcctgccgacgggctcggatggaaggccgccgggaagaggtcgcggtacgtctggtagaataggtgggggaacgtcgtcccgaaaaaggcaccgtcgacgccctggaagcggctcgacgggggcgcatagaggtcgccgcagtttggacagtagagcttgacggtgtcgagcccaggctggtcggatcggccgcaagggacgacgggcgttgcatggcagaagacgcgcgggcaggcgccaaatgactttgcggccatcgactggagcccttgacgcgtcaggatgtagcgctggtggacgaggccgtagaggagctcggccgatgactcgatgatcgacacgtctggaatcttgagcgagtcctcctcttctgcgcgggggcgaggcaggaggagacggtcagcacttcacatgttggccagacctcccggcgtgaggggcgaacccggctcgacgtcgagcaccatctcgagcgcctccttccagaacgggaccattccctggaggcccgtcaagttgaagtcgtcctcgatgaagtcctcggcgacctcgcaaaagtactcgtggccggggagcgaggtgaaccaggtctggcgccggccgaggtcgtagggagggcagggcgggcggcggacgaacgggttacagaatgggcgcgggtgcgagagagcaagcggttagcgacggcgacctcttgggcccgagcgataacgacagaggaggggcacggacgatccaggtcagggtcgacgtctgcgtgctcgacggcggcgaggacgaagctgtcgttcgagggagcaccaggaggggtcagcttctcgacggcagccggccggacgggcgaggagggactgaccgtaagcctcctcgtcctcctcgtgctgctgctgctgctggtctgctgccgggctgaggtccatggctgggctggttggttgaggtcaaggttggccgtcgctgccgagtcgccccccgccgctcctccggcagagttggcggcgcgcgcgtccctcggtcggaggcagagccggccggccatcttcccttcctcccggatcaccaccaccaccatctctagagaccatgtcattcctcctcccagacgacgacgacgaccagaacccgtttgccaacgccgtctcgccatttgcttccttcactccggcagcagcaccaccgccaccgccgccgccggcagactacggctcgccgctgccgacgcccggcgaggacgccgtcggccatacgactgggccgtacgtccaggccctaacaaccgacgacgacggggcaggaggaagcctcagcggcagcgtagaaggggtagaacgttcctcgtcgtcgaatgcattcgtcaatccagctgacggcggcaaggaggacgcgaacgagcgtccggcctcacccgtaccgccgccgtcgtcgctaggtgcccctgcgcccgcctcgcccgacgcctttgccggcggcttccagagctcgccgactgtccaagccgcgttcgacatctaccggccggcctcgccgcctccgctcgggccggcagtcaacggcggcgcattcggcacgtcatctcccccctcgtcgtcgacgacaacggccttcggcggcgcgcccacgcccaccccaagcagcagcgcgggcaagcggccgccgaccgagattacagcgtcccttgcagacctgctcggcgagagcgagtcggcccggctcaaaggcgccttccgcaaggctcctgccggcggcggcggaggctcggccggggtcaggaagccgcttagtacgacgacggcgacgacgaagacgtcgacgtcgacttcgaagggagagggagcggaggcgttggacgacgacgatccgtttggggcgttggtgaggcgacggcacaacaagggcaagacgccggcggcggcggcggcgacgacgggcgctgctgctgctgctagcccggcgagccattcttccgccagtgctgctgctactcggccgcagacgatggcggcggcccctcttgccacagcggtagacaagggtggcccgttacctacgcccgccaccactgccgcctctgctaccggtcaaacatcagccgacgccggctctgcgcccgcacccaccgacgcagcggctcctgtcgcgccgctcggcgccgacgacacggcacaggcaacagcagtaggggcggcggaggagattcctttgccaccctcgaggcctggcacgacggacggcacgccgcggtcggcgacacccgccgctgacgcgagcaatacggtcgacaacaccagcaccgatcggacctcgacgccccctccaacgacgacgacggccagctcgtccattccatcggccgccacctcttctgcagcatcaacctcgtcgcgcccgtcatccccccgcggcggcggcggcggcggtggcgacgacaccgccgacgacgacgccgaccgctacccccagccggggcgcgtcgagcggtcattctcggagctaacgcttgaccccgcccgggcgcagcagctcgggctcggcgtctcgtccgtctcgagtgccgggggccacggcggatggacgacggaggcgccgttgagcggcggcggcggttggggaggcgaagaggagagactcgattttggagggcagccaggcgagtcgaacgggccgggcgaggacgatgatgaggtacgtcaatgccttacctccctgttgacccgtcgcttgaagatgagggctgacttctagaccctcctccttccgtcccctcagtcggaggctgccttgactgccccgcccgtttcggcagcagcgaccgagcccgcggctccgcccgccccggtcgacaaggacttccaacgggcagccaagcgtgccgaccggctgtttgtcgtccacatctcggacccaaccaaggtcggccttggcgcgacggcccacatcgtctacacggtgacgacgacgcttcgggccccgaccgagtatggcacccagagtaaggaagtcgccgtcctccggcggttcagcgactttctctggctcttcggcgcgctgagcgagggcaaccgaggggtcgtcgtcccacccgtgcccgacaagcagtcgtttggtgcgttctcctggcctcgccctcctgccgccggttggaccgttcgcctgacgacctctctggttcgcctcttgcaggccgcttcggcgacgagttcattgcccaccggcgggcccagcttcagacgttcctctccaagactgccgaccatgccgtcctccagcttgacccggtcctgaccgccttcctgacggccgacaattggtcgggcgagatgaagcactggacgcgctcgcgcgcgctcgacggcgcgtcggcagcaggctcgggcggctcgggcggcggcgagaagggctacctggcgagtttgacgagcggcttgaccgggcctaaatttgtcgagcgcgacgactggtttgacgatcggcgggcggcgctcgacacacttgaaggtcagctcaaggcgctcgtcaagtcggtcgacctcgtttcgaaacagcggctaggtcagtctctccacttcagctccttgattgcgttcgccgctgactggccgctcctgcaccgagccagacctcggcggcgcgatccacgacttttccctttcgatcgcgacgctcgcccaatgcgacctctcgcggccgatggcgctcgccctcgaacgcttctccgacgtcctccgccgggcaaaggagaaggaggagggcaacggccggggcgacgtcggcggcttcatggcgacctctgatgagtacatccgcctgatcggcagcgtccgggtgcgttcctcctttccaggtcctcagactttcggatcgctgaccctggagccgaccccccgtctcgagcagaatgcgtttgccacgcgcatcaaatcgtacctcgcctggcagaacctcgagctcgacgcccggcggcaaaggacgcagctcgacaaggcccgccggcagggcaagctcgcggccgagcgggtcggccaggaaattgctctcgtcggagacgtgcgttccctgttgactcctcttttcatgccgcgctgcttcgagactgattgactcctcgtgtgtctgctttgttctcgacaaaaggccgagcgcagagccaaggaggccggctctgaatttgagagcgtgacgcgactcatcaagaacgagtatggccgctttgaggacgagcgcatcgacgatttcaaggcgatgctcgagacctatgtcgagggcatgatccaccggcaaaaaacggtcagtctgaaggcacctcttactctgggtcccgatccgactgacagatgaccgctccgcctgtctctgcagctcatttcggcttacgaggagtaccacacctcccttgtccggctcgtccagcaatcgcagccccagccaccgagtcccgtccagccgaaactcaactcgccccctcggccgacgacgtcaagcgcgaacggcggcgacagtccagagcgttcgagggcgggtcccggcggcgcgatggctggtgggccgaatccgttcgccgaggaggagggcgagcggccgggcggggacgcgctcgcgagcttaccggttgagaatgcttgggcgtgaagggcatctctgatgatgctcgttgatctgttgctcgagaggcgctggcaggggggcgagcgcagtgttcgcaggcccgagcggtcatcaagggtcattaggtcgtcattcgcaaagagcgatcttcattcctcgccctcgtactcgtcatactcctcctcctctgcttcgaggtcgtcctcctcatcgtcgcccgactcgccatcctcgtcatcgaggtcgtcgtcgaggtcgcgcatctggtcgacgtccgacacctcggccgagcgctcgcgatactgctgctggtgccggccgtgcccgccgcccgcgtgattgtgctggaacggccggttgtcctctgcgttggacggcggggtcggggacggcgtgcgagtttgctgtagatgggaggccggaagcaagcttgagcggcggacgcagggcgttcgagcgcgagaaggggaacagacgtacgaccgcgtccagctcttcctgtgttctgaggatgccgatcggtacgaggaaggtccgtccaaagtcttggatgacgtgattctgattgtacggcaacaggaggtcaggacagcgctaccgagaccagcagcagcgacagggaggacgcacccgaaactcctcttcctgctcttcttcgctcaggtcacgcttttctgccgcgaggtcgacaccgagcggcgcccggccctcgagcagccgttcgagtcccccctcgtgctcgtgccggaggcggtcgcgatggctggtcggcccagtgccgctcgcagcagcaccgtcgacgccgtcgcgtcgctggactgcgccggccatgctcaacaggcttgcacggggccggcgggccgtcgagggggccggaggcggtgggcctctcggcggccgacgagcctggagggaagcatgtcgagaggaggaggccgacgaaggaccggccgacgaggcggtcgaggttgacgggttgggcgggctcgcgaacgagaaggggatggacgaggctgggtagaagacggggagcggagccggggctgaaagcaaggtcggtgcgaagccagtgttgtacgccatcactgcgggctggcccggatacgagcaggcgagatgagggccgtctgagagggcgagttgacggctgcaaggcgtgccaaagggtcgccgttaaggggttggtccgggtcgggtcgccctcgtccacggagctccgagggagcatctccttcccgccaatcatcacatcgcccagcagtcggttcggcagtcctcagacaccctacacgcagcacgccagaaagcctcgctcatggtcgtcttctttgtgccagagcaggttgctgggacgagtgggtccaatgtcgtccagcacctggtcggcatccagctctcgccgtcgctggccgtcgtcgcgacgtcggtcgctcaggagcagcagcagccagcgtcgcgacgactgccggccgaggtgctgcagacggtcctggatcgtatcgatcctccgcctggctggccgcaaggctccctgcgggtcctgggaggcatcggagggagcgggccggccgaagtcgcacgcgcaggcggcctgctggggaggatccgactctatccttctccggacggcacgacgccagtgtacgtccttcccaagccgtctgcgaggatattcacatgatctgaacctcgtctttcctctgcagaatccgctcgctcgtcctgtttgacccgccccacccgggcaagcaccacttcctcacgctcgacccgatccggctgcgcttcgcttcgacgacacccgaggcgacccggtctcaatcctccgacgacgcttgcgggccgacggatgacgctcgtagaggcctcctcggcacaattgatgtggtgcgtaaagcccgtcaagtgatcaggggacggacgtgtcgtgctgagctgctgcatgcatccccctttcgcagatcaacgcagcgcaccagatcgacgtcctcgtccaggcggctgtcaggcatcactcaggcctcagtgccggcgagagagagctcgtcaagccgtcacgacttggccatcgcgttcggcttgtcgtccagcgcggcgtcggtctcgtcggaagcgccattcttacactgctcgacaacggccttcttccgggcgtcccacctctcaaatatgtgtctgccttctgtgcgtttgactcgcctgcccggccaccttgcctctctattactgactagcccctctccatccgccgttaggccaccagctctctctgcgcacgcgccaggccgtcaccctgtctgagcagctgccgtccctccgtcggtcggtcccgccagctcgcgaagttgcggccgctcgagcgtcctacatcggcttctacaacacggtctggctcgtccttaatgatatgatcgtcggccaggcgcttggcaggctcatccgggccaacgagcgcgatttgacggacgcgctcgcgtgggcgatcaaggtgtgacgagcttgtcgactgtgagggttgcaagtccagcgggagggctgacgagctagatccactctacagactctcacggtcgagctgccgctcggtctcctgctctggctcgacgactggcccgcaggcctcaagctcaacaccgagctctcagcctttgcctcgtcggctctgacggcgctcgtccgcttttggtcaacgaccgtgctcagccggctgatcggcagcctgccggccgtttttcgcctcgcgtccgtcgtcggcttgctcggcgcgtcggcgctcatcgctctcaccgctgacttgctgagcctcgcgacggcacacctctacctcgcttacgtcggcgcgaccgtgacgtaccgctcgatggctcggctgctcggcggcctctttgacgtcttccgaggtgcggcccgagtctgtgtgtctccccgctgctcgcgcctgaccccatcgtctcgcccgacccaggcaagcgccgaaacgtcctccgccagcgcctcgactcgtcgacctactcggtcgatcagctcctcgtcggcaccctcctctttacgacgctcgtcttcctgttcccgaccgtcctcgcttactacgcgctcgtcgcggccggaagggcggcggcagtgctggcgcatgcggcgctcgagacggcgctcgcgtgcgtcaatcactggccgctgtttgcgattttgcttcgcgtcaagtcacctggccggctgccaggtgcgtcttgagctgccttccgcgaggagcgcgtgggactgacgccctttccttccacactgcgacgctgcgcaggcggcgttcacgtcgagccgacggtcgaacccggcatcctccgactccgcacaaagcccctcccgatgtccaccctcctcaagcagcaccgtacgtcccctcccccttcagaggctctcaacgaaaagcaaggacagaaaagatagcgcgcctgacacctctggctcgatccaactgcccgttcggccactgtgtcggatgtagtgttcctcgccgcccggatcctctcggtccactactcgcccgtccggctcgcgcgcgccttcgtccacggcgagatcgtcacgcccctaccgagcgctcggaacggctaggtaaaggagcgggtatatcaatgtggcgttgggtgaacttgcggggttggcctctgatgcacgttaggtcgattctcgtgcctgcgggccggggccgttacggtgcctgaacatttggggttgacagacgcccctcgccaggctcgtctgtcctctgccaagcgggaggcgaaggatgcgaacggtcgtgggccaggcctctgtccgctgccgccgctgtcgcctcttgctgctgctgctgatgcacggcccgctgtgcccgccagcgctcatacagcacgccgacttgcgggttctgagagagcaagaccatcgaagccaaccggcacgcgatcagcgttactcctcggaaagccaacgagagcaataatgagggggcgaagggaggaacggacgctcgcgatcagcgccgcgcgctcgggctcggtcaagccgggcagggtccggagggcgtcgaccgtctgctgacggctcatcgctggcggagcggctgcggacgctactcctgctggctgctgctgttgctgagacggatccgacatggctcaatcgagacgcggttgacggccgaggcgggcgagcgatgtaggtctacgtttgtgtgagcggatgctggacggccagtcagcgaggcatagggtagcgcgagcccggcaggtcggtgctgagctcacgtgcgaagcggaaggaggacgagggtagccttcaagaggctgagtgtggggtcgatgacgtccaggacaacgtcgtcgtcgtcgtcgaccgaccgaccgaccgaccaggacgaagggagcgtgccttcgagctgcttgctctccgcgacggcggcgcgcagtccatcttccgcgaacatctcatcttggtcgcctcgctcgtcttcgctcgctcgcttctcgttctcgctcattgcagctcttcggtccatcggctcgagacggacggcaaggcacgacgggcgggcgctcgagctgacagacatgcgcgacgatggggtggtcgtgatggtggtgcatgcgatgggtctgggcgtgcgagagaggccagctttgcgcgcgcgccgcttagaggagtgcctgtctacgagggtttctctagcgcgagagcgcgaagaggaacgtggggtgtgcgagggaccagggcgggtagagcgaggaccaggccctgccggccagctggaggtgcgccaggagccgtcgtcgtcgtcgtcgtcctccccttggctcctcaacggcttcgcaccgagcctcctctacccagcagccgccatgcacagaacgcgtcccctctagcgcataggctcaggtcagctgctcccagggccgaccgcccccccaacccgagcgccgccgttgtcgaccgtctagtctggatcaggtgatccgacgagtgggtgggtgcagaggacggttcggtcagcacagctgaggagtttcccccccctgtttcccgcaggagcgagcgagccgcaagggaaaggttgtcggtcccgagcctgcctttccagctacgcatttagcgtgctgaagggtggccgaagccggccggtgggcgaacggcgaaagagtcagctgacgggagacgggacaaaggggcttgacttgattgaccggcgcccatctccatccaacgacgacagacgggctcgcccaatcagcgtgcggaaggcaggaggaggcgtcagcagcgctttccgaacagagatagatggcaaaggcgaggagagtctcggctttagcggcccccccgggccgggcgccacgagcgagagtggggtctagagggtaagcacgacacgccaactcgacaggtgccgacgttccgtccgtagagatggtgagggtctaggcgaccaagctgctggcggtggggtcagattgttgtcgccccctttagccagcaggtgggaggggcgatcgagcggaagggccgaggttgacggccgacccgacgcgaagggcgcgaagggcgcgggcggggcaggctgggctccgcttggacggaggaaggtccgggcgtcggggcggcgagagcctggcgggcgacgagagtcgacgagcgagcgggcgggcggacagacaggagaaggagcgacaatgtccattaaaaaggtgaatcagccccccgtgggatgcgtcagccgggcagagggcaggcaggcgagtcgagccctggactgtcttttgctgctgctgctgctgcttgatggtcgttgattgcggaagtcgcgcaatccggcggactgccgaccgtcgggtcgatcgcaatctggctggtggctgattgggctggtcgcgcgctctggcgtgccggcgccgtcttcgcccccttctgacctccagacgaccagcaggaacgaccagccagccagccctcccttctctccctctcccttggccgccccttcgtgcagcggcgactcggtcgtcctcggtacgtctttctccgctcctcacatcccttcacccctgctcctgaggagaacgcgctccacgcggctttgctttcttccgaagggggcggcccgtcgtcgggccagcctctcgggggcatctcgcccatccggtaatcaaatcataccagacgactgacgaaccgtttctgcgactcccggctttccttctgcagtgcttcgtaacacgacgtagagcggcctgccgttggcaagatcgcagacggagagaaggggagagggcgagcgcgggcgcacacaggaggatttggggctggccatcctcctgatctccggttgttccggacagcggggcgacaggagcgttgggtccttaggctctgcgatgcctgagcgaggagaagggggcatgcccgggcccggcgagtcgagcgtgcgcagcggcgcctgaggaaggggcaatcttttcctctcctcttgcttccgcctcattacctattgtaccaagatgtgtcttcgctcatctctcggccggcgtgctgcctggctcgtgcgctttcagtcgaccttgttaagtcgggcggctcgaggcaaggtcggaaagacgggcgcgtccctgcacgcgcgtcgttcgattcgtcggcccatctcgccgcttccctcgctcctccaccccctttgtccgacccaacacccaccgacaggccggctacctcatgtcctaagccacacacctcttcgaccagctcagagaaacaccaacgacgacgaccctttggttcccggagacgctcgcatgcgaccgccgccggtgacgacgacggcgccgacgacctctcgcgcttcgacgacggccggcagcagcagcagcagcagcaacggcagccgcgacaatgctcgctccaaatcactgttgacgccaacgccagcaccatcggcgggcacgagtacgacctcaaacgcaagcacaagctcaggcgggacgagcgggaggattaagccgccgaccgggaccgtcgggggaggtcgtcggtcgccttctccgctaccgccgccagcaccgccaatgacggccggcactgctcctctccctcctcctaggacgccggtggttttggcgatgatggctggcccagctagtcggtctccctcttcctctgatctcctacttcccgggaagacgcacgttaacgcacagcgacgcacctcagctggcccgccctcgacaaggacagcaacgaccaccagcaccgtcagcaacggcgccggcggccatcgctcgcacgccggcccttggaagctcccgtcgtttgagtggtcatcctctgccggcggggggctgatgccggccgagcaggagcaggaatatggggaaagccagggtgtcgtcaccgcagacagcggaacggccgctggagccgccgctgcctccatcgctggggagagcgagcggggaagcgctactggcatcgaagcgcggacgacggctggtcggctgtcggacggcccggagcggatgacgccgactacagctagccaaccggcgggggcagcacgtcggaccggccgctcacgctcgccagcagcagtgacggctgtcgatcggccagctcggtcaagcagcagctcggttctcggcctccagacgacatcaacaacggcggcgggggaatcagcgagccgcccgggggtacagcagcgaccgccaggaggaggaaggccgcccgtcagtctcccgctcgacccgttccgccggtcgacggctttcggccaggcccctatctcctcctcgtccgtcctcgccgccgccgttgtcgctcccgtcgacgagctccctccgctcccgccgtcgccgaccaagaaggcatcgagcgtgagcaatcaaacccgcaggcagccctcgctcccctcgacgcttccttcctcacgaaaggccgcggggggcaaagagatgcgccggccgagcctcttctcgctccggtcgacgacgagtgcggcccctgccgcttcttctgctgctgttgccgttccgcaagcgccgccgttacggacccgatcgtcgacgatgggcgggaccgtcgccgctccgactcctcttcctcctgcaccacccccacaaccgtcaacgtcggcctttgccaagctccgcgactcggtgttctcggtcgtcctgccttcatcagccgctgctgcgcgagaccgcgagcgccagagcgccgcgtcggcggccgccccgtcgtcgactttgctcgccgcagccagacagtcgaccggaatcgtcacgcccgaggtcgtccaaacgccacctcccatcgacgacgatgacggggaggtgctagccgatccgtccggctccgggtcgtatttccctccgtcggctgctgccagcgggcgctcgacggcgcgcttcggtcggccggcgctcgagacggctgggtcgggctcgtcgacgagtctcctttcgttggcgaggagcgggcctggcagtccacgactaccaacgacttctacggggacgacctccggctcagcacgctcttcgacgcccgacgtcatcgaccgctctcgcgcgcctcgcgagcccaagtcgaccacggcgagtcctcgacggccgatttcgagctcgcttctcgacctcccgacgccgaccggcctgatcgcttctggcagcggcggcggtcgaacgcggctccggccgaggtcgtcgactgacccgccgctgccggacaatcggctcctcctcgcaccttcgcacggcgtaagcagcagctacacgccgcgctcgccgctccgacgcgagagtgcgagtgcgggctcgtcggccggcggaggaaggtcgggctcgcggccaatgtcgatccggaggctgtcgtcttccctctttcagggcagcagtggctcagccggctcgtcctcatcgacgtcctcgaccggcctgcagcagcaggcagcgaatgccaacgccaccggcggcggagggcagcctgacttcggcttgctcttcggcggtgcaagcccccgctcgcgctcacccgtaaagctcttcagcctcccacgcgggctcgcgacgccgccgatcgtcgaggatcgcatcgtctcgtcgccgacgctctcaccgttcacgacgccggcctcgctcggtagcgccctgccccatccatcccgccagtcgtcaacctcgtcgcttgcgctcgcgctcccgccaggctcatcaagcgcatcctcgtccgacccgaggccgatcctccgccgtggctcgtcagcgggcagcgccagcgctcggcgcaactcgctcgcctcgtcgaccggctcgtggtcagcctcgcgtgccggctcgtcgtccgtcgtccatctcacgggtgccggcagcggctcgcggagggggagtgacgacgtaaggaagtgggaggcagatgtccctcggcgggaggacgacgagggcgtcgacgagtggctgagcaggctgagcgaggtcgtcccacggagcgagattgcctcaatccttgcgtcgaagtgcgttgtcccttcgcggtccacgtcacaggtccattgctgacagcgtcggcctgaactctctctctctccagcggcgacgagttccacacggtcgccctacggacctacatgctcacttttgacctgtcgctcctcccgctcgacattgcgctccgccggctgctgatggaggtctcgctcccgcgcgagacgcagcagatcgaccgggtgatggaggcctttgcaaagcaatactgcacctcgaatccggggctttttgtctcggagggtgcgtctctgacatgttgctcactcctcaaggtgcaaagagctgacccttctgggtcttcccccccccccccccccgcagaccaaccctacattctcgccttctcgcttatcatgctccataccgatgccttcaacaagtcgaacaagaacaagatgaccaaggccgactacgcgcgcaatacacgactcgacggcgtcagcccgctcgtcctcgacgtgagtcgcccctacgtgctggcccctccttaccgcgcggactgacgaagagcccgccatctccgacagaccttcttcgacaacattaccttcacgcccttcgtctttatagaggacgatctcgacgtcaacggctcgcgctcgctcgcggccgattctggctcgtccagtctctcgagcacctcgcccttcggcttctcaacgacgccgacgacgtcctttcttgcgggcgcccggccaccgtcgaccaataagatcgacgtctaccacctcatctcgaccggccaggtcgtctcgctccgctgtccagaggttgcgctccagatcccgcgcaagacgccgttcagctatcacggcccgcgcggcttttttgacacgggcgagctccatgcgagctttgcagaggcagacatgattgaggtcggcgatcagcaggcggccgccggcgccggctcgggagatggtagccgccgaggggcggtccctgctcgtgccgacggcaagagccattcgctcaagctgacaaaatacggcgttctcagccggaagggtgcgtcgagccgctgcgcttcacaatctttgactggccgctgacccacctcttcccggggcccgatcaacagaggagacgatcgagggcggccgcaagtcgtcgaatcgcaagtggcgcgagtggtccgtcatcctaacgggctcccagcttctctttttcaaagacacgacctgggcgctcgtcctccgcaaccaggccgaggagcgcgtcggccggcggacgcctggcgccggggggaggctgctcttgcccaagatggcgtcgttcaggccggacgagattctcagcgtcaaggactgcattgcgatcaccgacacgacctactccaaggtgcgcccgtttgcttgacgagggtgccatattttgggtgcttaccatcgtgctcgctgctcgcagtacgccaacgccttccggttcgtcatgccgcacggccggcagtacatcctccaagcgagcgacggcgacgagctcggcgagtggatggcgcgtatcaactatgcggccgccttcaagacggcctcggtgcggatgcgcgggatgggcatgacgggcggccaggcccagatggctggcgccgctgctgctgcttcgcacgcaaaagccctcaagtcggagagcgtcggcccgctctcgatccggacgatcgactcggcgttcttcagcgcgacgcagagtcagttgccgagtgcgttcagacgcgacttgcacggcaggacgactgctgacgtcgactgtctcctctcttcacagaccgctccatcggccggccacgggccttgacgtcgaccctcgacgcttgcccgtcttcgtcgctcagcagtgtgaccacctcatcacagcttgcgccgccgagtccgaagcccggcttcaccgcacgcctccggtcctcgtccaagccgcccgaaattgcgctagagtcgccgatcgggccctcggtcgacagcggcgagcagctcgagtctgcgttcatcgagatcaaggcagagctggctgccggccggggcggcgtccagcgcctcgcatcaacctcggccggctcatcggtcgtcgacctcaaccggcagcacagtgtccgctctcgggcggcgagcgtcggcggtctgctcgacgggacgccacctggctcggcccggggctcgttcgagaagctccacggcggtccaggtgtcgagctcgccgagtttggcgccgccggccggtcgaatcacgcctcgcgcgccgaggcgatccagctcaaggtcgaccagctcaaggagcgcatccgagcgaccgagcagcagctcgacgccgagctccggacgacgcgcaaccttggcatcctcgcgcccttccgcaaggccacgcgcgaacgaatcgccgccgtcgtccccgcgctcgccacgaggatcaggacgctccggctcgagctcgcccgcttccggtgctatgaagagatcctggaaaaggatctgcggatcgaggaggacgagtggaagctcgtcaagcacatgtgcgtccgagtctcgcctgtggtcaccctgctcaggccgctgacctcttcacaaaccccgcctctcagcgcccaccaagccgcacgatcctcgctctcgggccacaagacgcacgcgaccccgacgcgtcagttgagcctcccaccaacacgcctcgtgatccccgacctcgagatctcgatgcacaccggctcgacgccgccgccgccaaagcacacggtcagcagcggcttctcgtcgacctcgccctcggcgccgacgaccccgccgccgtcggctcgcacactccggcggcagccgagctcgattgcgagcgacggcgcttcatttcactcggccgtcgacgacttgcaggtcgacacgctacagaacgacaacgacgacgacgctccgcttcccgtcgcaaagaacgacgtctttgtggctcgggcggcccagcctaggcggctatcggcagacgaactcgtcccgccatcgtggcccgcacctctgctcgacgccggccctccgacgccgcctgtgacacgtttcctcccctcggcagaccggccgctacacccaagtgctcagccctcgctggcagctgaggaggagtcggccgagacctggtcgcagacgcgggccggcaagcgcgtctcactcgccgaggtcccgaccgagacggtccggcggatcagcctccagcttaagcgcaactcaatcgaggacatccgtcggcgggccgctcgcgagagacggcagtcgagcctccggctagagacagcggatgtcctcaaggctgccggtccggcccttgcgacgccaatctcgcccaaggccgccgctgccgaggaggacgacgcggctgacgcttcctcgctcctgacgatcgacaccatcatcccggccccggccaagccagaccggattgtcgccctccctatctctccgtcataactcgcgtcctctggtccttctcgtctcgccggtcgattgcacacgaccccccttcacgcacctgcatccttcctctgactacgccggactctctccactatctcacgtccctctcctccccgttgtactcctctctccccttcgacctctgtacttcatgacagacctgcctttcgtgcaagtgcaactggccggtcaggcgtcctgcgctcatagttgaaaccatttttgaatccgtatggcggctcgcgcccggccgttttcgcgcgtcggcctcctcccgttcctcctccttcactcttaacctgacacctgaccatcttgctgcctcttttccgaatgtcgctcctccggtcgatcgtccggtcgtcatccaagccggcgtccttctcgtgggccgtcgccggtccttcgtctgcaccagccgcctgcgtctgcccgccgctgcctgcccgtccgtcccctcgttgctctcgcatcgctcgccgtgaccgacatcactgacccgccttgctctccctgtgcttaacgcttccagagcagcgctcgttccacctttcggccgctcggtccgagtcggcctacaagcgcaacaagcgcatgaaccagaaggcccgtggcgaggccggctcgcgcaagaagcgcgagtggtacgccgagcagcccgatccctacctcggcgtcaagctcgaggtgagtcggcccttgcgcctgcttgaaaagagcctgtcgctgaccgtaccttccctttcttcagtgggatgagaacggcttcccgctgcacgagcagcgctggcggcagaccaagctgtctgcgctcgtgctcgatccgcacacgctgtggcactctggccccaacacgccgaagcagatcttttcgacgctcgccaacgcgaaccaagacgggccggccaagtctgagattgcgcgtgaggaggccgagatcctcggcgagggaagggcggtcgagctccgcgagaagatcgccgacccgacagcagaggtcgcctctggcggcagctcgaccgaggtggcgacgactgaggacggccacgaggccgagacgcagcagatagcgccgccgcaggcgtctgacttcccaatcccgcgctacctcgcgcatcggctgccggcggccgaccgcgagttcctcttccggacgctgcccaagacggcggccgcggcctcggtcccgctcatgccgaccgtcaacctgacgccggccgacagggctcggcgggcggtgacgactgccgctgccgaggccaaggagacccctcggctcgaggcgatggctcggatcctttcgctccgcaacgcgagcgccaaggagatccggcgcgagagcaaggcttccatcgtagcggcctttggcgcgcccgaggtccggtcattcaaattagacacgccgaaggagcgcaagggccccgactcgggctcgatggaggttcagagtgagttacgcagcacgctcgagctccttctgtcgtcgacacgccgctgacgagcctgcctcgctgtagtcgctctcctgacgatgcggatccgcgcgatgcggtcgcacctcgccccgcacatgcaggaccactcgaacgcccggcggatcaaaatgctcgcccacaagcgcaagcgctgcttcgagtaccttaagcgcaaggacctcgtccgctacaaccagtgcctgatggaggtcggcgtcgacaagcgggccgtcgagggcgagctcgtcatccaccggtggtggtgcgtctgtctctgctcctcctctcctcttgccctacccaagaggcgcgtcactctcctacccggcgcatgtcggcagcgagaggacgccgtcctctgcacaggatgaccaacttaaaacccaaacaaactgatttaatgaagctgagccctcgggcgacgacgccaagttttattctcgtctgatccaccaccaccgcctctcccttccctggctcgaacctccgcccgatctcgcttgatactgacaccatctgctcttgtccttccgacccacaggcgtcagatcccgaaccggctcgccaagaagaccaacgagcgtgtcaagtatgtcggccgcgtcggccaccacggcccgatctccaagctcaagcgccgggtcatgcaccccaagcacatgggtggccagggcatggaggcccactactgagtcatgctactatgagactctcacttcacgatcacgagcgagcgaagtcagagagcggaacgggcgtgaacagtcggcagcgcgtggctgggaaatgaggggcgcgagaacgacgcgtcctgctggctcgaaaagccccgccgagaggagcctgtcggccgtctccaaccacccagcatctcgcttttcccgctcgcccgactctagccgcgacacaccgaagagacctccctcccagcatgagtggtgcgctctcgctcgcttcggctttgcggcagtcaggcgccgacgcctgccgagctcgagctgacacctcgcccctccgaccccacgcgccgcaacgcgtcctcctctcctccttctcgctctcgctcgccgcagacccctacaatacgaacggcggcggcggcttcttccagggcggcggcggtggtggctcccagtcgtctcagggcggcggcgcccgcaagcgcaatgacacgctccggcccgtcacgatcaagcagctgaacgaggcgtcgcagccgcacccggacgccgactttctcatcgacgacgttgacgtcggtcaggtgcgtgttcatgacagctcgcggcggcgggaggcgttcaaggcggagttggaggggcgttggtcgtctttgcaggctcatccgttcgcgtttcgctcaggccatgagctctcgctgacacctgctctcgccccccaccttctctagatcacccttgtcggtgtcgtccgcaacatcgcgacccaggcgaccaacgtctcgatctctctcgaggacggcacgggctcgtgcgatctcaagttctggctgaacgacgagggcgaggacgacccccggctggagggcgtcgtgtgcgtcgcgtgtgcccgactccctactcgtcggctgcctatgctgaaacccccacctgcacgcccgtttcgctctcgatcttcgcagtcaggacgtctacatccgcgtcatcggctcgatcaaggattttggcaaccggcggcacctcgccgcgacccaggtccgggccgtcaccgaccataacgagatatttttccacctactcgagtcgcagtatgtgcatctcgtcatgcgtcggggcaagccggtgactcctttctggttgcgactgctccctccttctcgctcgaagctgacctgcgctcgtcgattccggcgctgcagagggacaactcgagcgtcgcgctcggcggcggcatcgccggcggtaatgctggcgactacgctgcgggcggaggaggaggtggcggtggaggcgggcagtacaacgacctcgtcccgtgcgtagagcccggctcgcgtacctcagctctgtacctctgcaggaccggcgttgaccttccctcgtcctccctaccctcatctcttagcctgcagcggacaatcatgcaggtcgtcacgagcaacccgcccgacgagggcctccacgtcggtcagattgcgaccaaggtcacgggctacgacacgcaagcgatcctgtgcgtactcactcccactgccctctctgctcgctggcatgcgcgttcacgatcgctgacctcgcgtccttgctctgctgcgcgacagcgacgggatcgaggagctcatttcggacggccacctctacacgacgatcgacgacgagcacgtcctgccgacatcataggccgtcgccgccgtctcctcgcctgcctgccctgccatctgctccgtcgctttttttcatgctctctttgacgacaaattctcgcgagcatcaggcctatagacggaaggaaggcgtgcgtgcaagcacgtcaggcagccttccttggatgataggccgtggctgcccctgacccttctcgacgccgacgagtgctgcgcgcgactgcctttcgagcgacgacgcgaaggggcgactggcctcccttcgagccagcactctcgagtttaccctcgacccgggaaccgctctggactatggaacgcacagcttcgtccggttgctctggtgcgtgacgagcaattggccctctgtcccacttgagctgcttcgcctgacgcattagacttgcaggcttctccagctgaccgacaagtacgctccttcgccgaccgaccccgacgagtgcgttttactcctcgacgagccgccgtttgatcgctgatcctatacctgccagctgccttgacaaacaggatcgccgaatatgtccggcttttcttcgaatcaagcgatttgctcgacgtctccgttaaggagatccttgccaaactgagtgattaatgctcggttaccgttcggtcagttgtcgaacacatcgcctttccaataacgggcgccgactgacgtccagctgccgcatccccttttagtcgcgtcatcaataagctcatcatggacggcgagcttgtcgtctactggaggatgggctagcagctcgtccggatggtcggcatagccgactgaactcctaggcccatctcgcccccagctttccctccttttacttgcgccagctcaactacgacgtcttattgaccacatgcgctcctcttgagagcgagcttgcgccctgtgagcgcctggcgaggaacgaccgccagtctgagaggtgcgatggctcctttgatcttgtggcgaggctgctgcgcgcgaaccggccggagcgacgagtcgaagtcgaccgtcgtttcctcgctcgaccttcctctctcgatcaccacccttcccaccgaccgctctcgaccatcatgaccaactgctgtccaggtgcgtcgctctcttctcggagcctgaacccctgacctaaccaagctcgcctaaagccaaaccagttctcccagttggtccggaacccggtctacgacgatccggcaagcacgctcgccgtcgtctcgtccgaaggccgtgtcgctcgcgttgacgaggaccgcctgcgctatgcgtcgcccgccttcgttggcctgctcgacgccaaagaggcggtcgccaagacggttgaagcactgcccatcctcaccctcgatggcaaggccgaggacatcgggcttcttctcaagtacctgcttgacccgagcccgtcggacgagctccccggtatcgccgagctcttccaatgcgtcctagtcgagtgcgacagtcgaggccttactctgcgcacgggccgactcaccatcgtcggcagcctgaccaaccttgcgttcaaatacgacgccaagcaggcggcgacgatcgccctcaacgagatgcaccggtatctcccggccgaagggccaaccgtctttgctatcgctgccgcgcacggctaagagtggctcgcaaaggacgcgctcgcctcgttcgaccaagctcagggctcgacagccagcggccgggccaaggcctcgcagtcgtgcagagttctggctcggtcgctcgacgagctgtcggacgagctctttgcgcggatgccgatgccagcaatccgggcggcattccgccttcgagagcggttctgcatgagcggcgagagctggccgacactggcgaagtagttccgcgtaggtcgcagccgcttgaacagcctgcttgttcgtctgctgactgtggcacgccttcgtttgcagcttgacggcaccgattcgaacgaggctgccgcatcaggcgtcgcccggtccgacgtcgaggctgtcggcccgaccggcgacgagcacgtcctaccgaccgcctaaggcgccttcatcggatctagctctgtcttcctttgactccttcatgatccgttaacgatacaaccggcgttgggagtgaggggtcgtcaagcttctggcgaagcagtcagcccgcgctcgtgaaggcgaccctctgagtggcgaccctctggaccgatgtcagatcggcgtgagcagctggtgcaagagaaggacgagaaacagtcaaagtcagctgagagaaacgcctgcaatggcggcaaaagcaaaagtacaggcacgaacccgggattgaaccgaggacctcaatgaagcgactttagccctaacattgcgtgataccactacaccattcatgccagatgaatggcaacttgtcacatgtaactatattaaacccaaagtagctgccattcattttgacagcgcccactcctgcttcccacctcgaccgagtggacctactcaatgagcgagggaccgaccgcgcccatctgcttagctgcgagttttattcacagtcaggaacgtccgccgagagactgagggctgacgccaggcgccctccctcggcggagggcctgctgcgcgctcgcctctcggtcgtcgacggccgtgcccttcatctcgccctgctctgattgtgcttcatgaggaaatctggcactgagaaccaaggctgacttcagccagagctaacctgtctgtctgacctgtgcttcagcgtgagggactgggagggacgggcccgggctctcgagctcggcctggcgcaaaatccgaccggcgacggtggccgcctcgcctgcgcccgcgagtcctcgacacttgctcgaactcttcggtcgcgcccactctcctccttctctttccctctccgcgccctcgtcccgtcgaaacgcccgccgtcccgcccggcttttcacctcgccacactcgatcgacgaccaccaacaccttcgtctttacctcaactcaggctcgagctcaagccaggctcgacgcgtcgttccaggctcagccctctcgctcgctctctctccaagctccctcgcccttccttccctcccacttcctctggccgcccgcgcgtccgtcccatcagcaagtccgggctcggccctccccacccaacctcgccgcctcctcaaccgaccgcgcgatggtcctcctcaagcgccagaagattgtctaccgcggcctgccagcgccggtcgcgagcttccagcagcagcaagcgacaggcgagccgccggcggcgccggacgcggccgacccgagctcgtcctcgaacggtaagaagaagggcccggacgacggccgcgacgacgccgacaagaaggaggagctcgtctcggctaagaaggaggtctactacctcgccgagacgggcgagatcttcctcgactacgagtgcgtgtctgcccttggccgtcggctttgctccggctcgccctctttcccgagcgagctcaggacctgcccaccgccccgaaggtttggtccgaccgctgacgagccgacctcctccgccttcgctgtgcaggtcctacgccgatcgcatggcgttctacaagcagaagagtacgtcgtgctgcactcttgccccgagagacgcgttagagctgacattgccgagcttccgtttccgtccttcgtccgcttcgctccctcgcctcggcctcctctcgccgcgcgcctctgccctctgcgcgtcacccctctgtcgccaacttcccggccgctcgtgaccctctcctctgacgcacgcacaacagccttccagtgcgaggtcaccggtcactcgaatctcgactacttccaagcctgccggtccgaggagcgcgaggcccggctcttgcacgaacgcttcccgagcaagctcaagggcccgctcctgcgcgccgtccagtttcgtcagtcgcgccgtgcatcctctctctctgggcaatgagctgacgcgtggtcgtttgctgccaccttgcagagctcatcggccggatggaccggctgattgacgtcgtccacgatcggttcgcgaaccgcttcttcaacggcgagcgtacgtcctggctgtccgtcgcgtgctctgcttctgaaccgactctgaccgctttctcctctgtctgcgctctcaggtgtctttgtcgacgtcaacggcgacaagtacgttcgactctgctaagccgtcttggttcgagcgtcgcactgaccagcctctgctccgctcaggtaccatgcccaggtcgtccggacgcaccagcctccagcacgggcagcgacgccggtcccgttttcgccggtcaagccggacagcccgagaacaaacagcacgctatcgctctcgcccccaccgtcgcctcaagagccgcacgtctccggatgcgacctccggttgagccaggaggaggccgaccggcgggatccgccgctcaagtactcgtactcggtccagctcgtcgacgtcaagggccgcgtcgtcggcaaggatggcgagacgggctcgggcgagggcacgagctggatggaggtccgggccgagcagctcaggtcagtccgagcgcgctctctcggcaccactgccaacgcagccagctgacgagagcctctcactttgcccgcagccgcgaccggcttgccttctccaaatcgatcctcaagcgcttcctgcgcgattgcctcgaccgcgacgcgacggcggcaacctcgccctggatcgtcaagccggcgctcgcgcaaaaatatgacatcccgaccgagctctcggaggagctcacgcgcgagatcgaccaggccaaggaggccgcgtcgaagcgccgcaagcggaagcccgtcgaggacgagccggcggcggaggacacggagggcgacggcaagattgagctcggagaggacggtctgccgctgccgcccaaaaagcgcaagcggcggacaaaggccgagctcattgccggtacgttcctctttctcgtgtggcctggcgatgtgcgactgaccgtttcgccgcttctcgtcttttcgctcttgcgcagccgccaacggtggcgtcatgcccgacaccggccggccgccgacgcccgaacgcaagaagccgctcaagtacccggcagagggtgcgtctgccactggctgcgtccggcccagctcttgctcagcactgacttcttcttgctcgttagactttctctgctcgctcaccgccaaggagatccgggagggcaagcccgtcaagcggccgatgccgcaccgtgacctgccattcggcgcccgtttcgagcagctcgtcctcacctggaacttcctcaactcgttcgggtccgtccagagcgtctgaccatcgccttcttgtacgctgtctcgctgaagccctcccccaccccgcgccctctgcagcaagacgctcgtgctctcgtccttcacgctcgacgactacgaatcgtgtctcgagtacggcctggccgatccggtccacccgctgacagtcgagatccacgcgacactcctcaacctcatctcgcgcgatgcaatcgtcactctgccgatcgccagcgcaagccgtggctggtcgtcgaaaacgctcgccgccgatgccgaggtggccctcggtgccgacggcctccctctcgacccggcagcagggacgcttgacgacgcgccaatggacggccggagcatcgacggcgacaacgacggcgagagcgcctggaagggtccgcacggcctgaccgaggccaaggtcgtgacgcaggctcaggaggttgcccgcaaggcgacgtggatgtcgggcggcgagctccgcgtcaaggactcgcgccggcggtgggagagctggctcgtcggctgcatcgtcgacgttcgtcctctttgctccttttctcttcgtcgtctgctcgctgatacgctctctcatcacctgcttggccctgccagcgcgccgaccaggcgagcttccccaagcacctcgactacctggccgagctcctctttaccgacgaggaggacgatgaggacgagacaccgtcatggaccgtcaccgactcgcctgtgcacgagagcggcccacggccggcgatgccttcgacgcgctaccacctgctcaagcccgaggctaagctcgagatcatcgcctttctctgcgagctcgcgatgcagactaaggtcgcgcgggacgcgatggaggagagcacgtcgcagctaaccgaggtccgcaaggagatgcaggacgtcaagcgcgaccggcgcaaggtgtacgtcgccacccgcctgcccctgctcgagtaggagacctccttcgctgaccgtctttctcttcgccttccgatcagcgccgaggagcggctcgttctcgatccgaccgacaagcccgaaggagatgcggccggcggcgtgtcgaacggcgcgcacccgccaagctcgatcaacggcgacgccatgagcgtcgacgaggccgggccgaccaacggcagcggcgcgggcaaggtcctgcctggcgacgacggcgacagcgagctctcgggcctgtcgggcgacgaggacgacgatggtgcctcgcgcgtccgggccaagtcggaggccgacgatggccagtccgagatggccgacgagtcgcggatcgagagtgagatggacgacatgtcggagacggcctcgatctcgtctcggccggcccgggcgatgggctcgctcgcaatccgccagcaggcgctcaaggcccagcagcaggccaaggaggccgaggcggccgctcgggcggctcggatcgccgagcaccgggccgaggtcaaggcgaagacggcgacgagcaaacagctttcgcaggagcgccgccggctcgaggacgaggacgcccggctcgccaagcgcgaggaggccctccaccgagacttccgcaagcagattaatctgccccgggccaagccgctcggcatcgaccgctttggcaacaaggtctggtggtttgacggcatgggctcgagcagcctgatcggccccggcggcgtcgtcctctatggtaccggccggctctttctccagggcgccgaccccaagacgcggtcgttctggggccagaagtctgactatcgcgaggacgagatccttaagcgccggctcgccgaagagggcgaggagggcatgcttaaggagggcgagtgggtcgtctacgaggacccggccgaggtacgtccgcctgcttacactgctgcgccgtgctctagactgacccgctcctcccttcctcctgcagatcgccgcctacctccactggctgaacccgaagggcaaccgcgagatcaagctgattgacacgctgcgccgctggtgggactacatccaccgcggcgccgagcggcgctggaacgtcagtcgagccgcataccgttcccgagtcgaccgtgccgcctactgaccctcgcgcgcttgcacaattctctacaggacatccacgccaagactcaggtccagacggccgcggtcgagcagcggcggtcgacgcgggccggtcagatgcccgacctcggcaagcaccacaacagcctccagtggcggaaccgcaaggccgagcccggtccgcggtaagccgagtcagtcctcgtctagcctttccgttgcgccactagtgcaggaccctctatctactcttgcagccccgtacctcaccctcatgcaatgaaccctccccgacgattgacctcagccgcgagcgctatgaggacgggccgatcgagagccgccctcttcagacggtgccccggcggccggaagagtcgtgaaaagagccatcaatcaccactcgctccctacttcggcgccggacggacccagccctggcgctgagagagcgtgcggtcgtacgggccatggcaaggggaatgggcagtcgcgggcgaggtagaggaggaagcagcagggtgagaggtcaggtattggaccagcagagtcagtactggctgcaaacaactgtgaaccatgaccagacatagcagcgccgttgaaagccctcgggcacgacgccacgccgatgcttgggcaagggggaagaggacgagcgacgaacctgcttgtgcttcgcgtctttcgagcagcggatgtagcaccgtcccttcctgctccgcaagaaatacgcgagacagctcgggtcagctccagtcatcctacccggtgccatcctgagctccttgctctgatggagtgacccgagccgaggtcgagcgagcccagcccctccgaggcatggcgggacgagttcaagcgggggacgcacctcatgacgacctggcaggcgtcgcacttcttcttaagcgccgaccggaccttcatcccccgcttgctctcagcccaggcaccgacggccagagcggtcatcccgggcctgcttgcgagtacgaccgaccgaagcgagggcaggaccgaagcgaggagcgagctcgccgaccggcgtgaggacgaggcaaggagctgggtcgaggccggcgaggatcggacgagcggccggaggagcgagatgagtcggggaagcatgggtctggctttgaaaaggacgagcgacgaggatgaggaggatcgacgttgaggagcagcaaccgagagagcgagaacggccgagccgacagcgggcgtgccctcgacagccacacccccttccgaacctcatcctgccctcacaccaaagcagctgactggtcgagactgttagaacgctggccagaggcgaggacccctggctcgccctcccatgcccgagctggagggctgacagacccgcgatcagcagatgacaccgccgaccaacctcaacccgctcttcgacgacccgaccggcgacctcgccgtcatttcgcacgacggcaagcaggcccgcgtcagcagctttcaccttcgggcggctagccaggtcttctttgacatggttctggcgagctcgagtgcgggcccggcgaagacggccgagggattgccctttgtgacagtgaccgaggcggcggacgagatcggcctcttgctcaactcgccctccattcgaggctaggcgagcagatcgtgccgctgccaaagatccagacgtgcgcgcctggcgatccggctgctcgaccgcccacctgtactgaattctgtgctcgcccggccgctaggctgctaaagctgacggacaagtatgcgatgccgcaggcgacgacggctgcgctctcgctcctgtgcggctcattgcctgccgaggcaccgacagcgttcgccctcgccgtcatccacggccacctcccgacggcccgctatgcgctcgggagcttcgagaccaagctgacaggcatcccagcctacctccagactcggtcgcgctcgctcgccgtgatccccgaggagctctttgacctgatcccgcggccggccttccgcaactacctcgccctccaggacacccttcattcgtcacacgccaagcacacacccaagacctgggtcgagctctcccagggcttcaaggtgcgccgtcctgccggctttgggttggcctcggtcgatgttgacaacctcctcgtgccctcctgatccgcaagttgtcaaacgagccactcgcctcggcgacaggcccccacgccccgccagcacctgtgccgatagtacatggcgctgccgcaaatcctcttctgacgtccgtatcctcccggtgtattgtgccctgtcagcgccaacctgctgacggccttgcgctcctcccccctcttgctggccaggctccggcaacggatcatccgctactgcaacgagatgacgccaagcgtcggtggccacgatatctacgtcattgctaacgctgatggagtgggccgaagaggactttgtcatgtgcgtaccgtctgacgtcgcgaccgcgcgctcggcccgatcgacatctgtttctctttcgcccacattgtagaatgacaatcgaggacctctgcgacgaaggtcggctcagcacgaccaatcacgaagatcacgtgactatgtcatagttcttttgttgttgcgaattgtggcgcgctgctcaagagagcgggcgaagcagccagagcgattgactcgtccctgcgcagaaacagcctggagggagactcgctctctggcgttgtgagaattggactccggcacctgacaaccctcgactttgactagggcgtttgcgtctcccgtcgccgaccaaaccttgcgtcagagcgactcgccccacttcctgctttgtactcgctctgctgttcatgtcttctttgcaagatggccttgcgttgctttcttgtcgtcggacagagctgggaccgctcagcaggagacaaagttggtcggaagaaacgcctgcaagactggcaaaagaaaagggggcacgaactccgaacgcgaacagcgcaagagcacgacgagaatcggaagtcggctgaaagaaacgcctgcaagattggcagacaaaatgtacaggcaagacccaggagaaaaggacgacagagcaccgcacggagacgagaaaaaataagggcacgaacccgggattgaaccgaggacctcaatgaagcgactttagccctaacattgcgtgataccactacaccattcatgccagatgacagccgatcagatgtattttattatatataacaattaaaaacgtccctcactccccctccttgagtcgcacgcgcgccgcgtctcctcgacgttggcaaccaaccatctctcctcgcgccttactcttgcgacctcctcggcatgccgtctctttcggagcggctcaagcaggctgcgcttaccagcaaaagcccgtcctcgagccggccgtcctcgccagatcaggccaagcgctcgacggcggcggcagcaacggcagcaacaccggaatcgacacctccgcccgaccagacctcgaccgagaccgacgtcgccgccgctgctggagcgtccttctcatccgacccgccgccgccgccgccaccatcagaaccagagccggcgctgccttcgcaggtagccatcaaggcgacaatgccggcgacaaagccgagtcccaagctagcagccgcagctgggccgaaggcgaacggtaaggggtcggcggcggcgcttgccgcagccgacacgtcgagatcgtcctcgcagccgtctggcagcagtggtagcggccacggccactcgtcgtcgtttgactttcacctgccgcacctctcgctgccgtcgttcccgtctccatttgcgaagcgcgctagctcgccctcggctgcgacggcccagggtcccaacgtcggcgccaaggagctcgcgaccctctcatcatcgacgaaccccgccgccggccgaggccgaccgcaacagtcgctcggcgccttcttcagtctcggcggcggcggtagtagcagtagtagctcggcatcgctcgctccggtcgcagcggtaactcgggagactcgaccagagatgatcgccctgccgccgagtccttgtgatgtcaagctgccgctccccgaggaggcggagagcgagctgctcatcggcgagggcctgctcaaagagtcgcccgaggagaagttggagaatgacgagatcagacgtctccggcaacgcgtcggaggtgcgtcgttcgctcccctcaggcccgagcatcctgctgagccggcactaacgcgcgtgccacgacgcctcagagctcgagacgttccagtcgagctgggcgcgcgtcatccgcgagaacacgccgctcgaggacatgagtgatgctgagggcctcgagaaccacctgcgcaacctggcagccaaggtcgaggtgcgtgggcactgctcgagtcccctctggcaacgactgcctgacctaatctcctctccctcttcgtcgctcggcagatgagcatggccgagatgcagcgcgtctacggcaagctcaagcgtgcgttactcccggctctggtcagagtgatcggcgcagatcgctgatgctgcttttgacgccgcaccctacagttcaggaagcccggcaggatgagatgcgcgagacgcatgcgctcgagtcgagctcgcacaccgcgacgatcgacgaccttcgggcctcactcgccaccgtcacgaaggagcgcgacgagctcgttccgaaggtggcgacgctaacgaccgagcgcgacgcggccaagacgagcgcaaaggaggaggaggagaagcggacaaaggcgatttcgttgctaaaaacggtccggcagaagctcgtcaagagcgacgctctgcgggatgaggccctcgccgagacggacacgctcaaggcggcggcgacagcggccgaggagaatggccgcaaggaggccgagcggcttaagggggaggtcgagaaggtccgggcggagcgcgagcgcgacgtccgcaacctgcgcgacaagtttgagcaagaggtcaagggacttcggacgggctgggagcgcgaaagccgacagaagcgtgaggaggccgagctgcgagccgtcacgattgccgtgggtctctcacgatcgcctgtccttcttcgcgcaggtcgctcatgttttcccttttcgcaggccaccaacgccaaggaggtctctggtctcaaggcccggatcgactcgctccagacgtcgctcaccgaggccaacgccgagaaggcaacaacctttgacacgctccagcagcgccaggccgaggtcgagtcagcaaaggccgaggccgaaaaggcaacgctctcgttgagcgagatccagtacgcgatgcgcgaggcccaagagcgcgtgtcgatccttgaggaggaacttatcgacgctcgtaggacgaccgacccgagccggtcgcgcgccaactcggacgccgtgggcagcatcgcagcggccaacgccggcgccgaaaagagcgataagacgagcttgctcgagcggcagctcgcgacgacaatcaccacgtacgagacgcagctgtcgacgttacgatcgaccctccggcgagccgaggccgaccacctctcggccgaggaggaatggtcgcgcaacgtctcggagcgcggcaaggaggtcgagcgcatgcgccgtgtcatggaggagcgcgagcgcgagtacgaggaggccctccgcggccggcgtgcgcgcgaggaccggctcggcgagcttgagcaggagctcgaggttaaggagcgagacgccgagcgggagcgccggtcagcccgcgaagagcgcgagcatgcccggcgagctgccgaaggcgaggtgcgtcctgtccttcctcaaatgcttgcggctctgctgaccgccgtttcctcatctccttgcgctcgatgcaggagcacgtcaaggaggagaaccgagatctcgcggtcaagctgacgacgatggagactactctcgccgacctgcgctcgcagatcactgtgctgcggcaggccaacaaggtgcgctcgccatgtctctgaaaagctttgtgactcggcgttctgacaagtcgctcgctcactgtttgcaggtgctcaaatcggagatgcagaaggtccagtcgtcggcgcttctgctcgagaagcagcgcaatccaggtatcggctactggtcggccggcggcgcagccggcacaccgaacggcagcgtcagtcgagtctcgatcgccgagtcgctcgagggcgcgcgtcggacgtcgtcagatggcccgccagcgagcgatgcgggcacggccggcggccaggaggaggaggtcaaccttgaggtgcgtccacgctctgcctatgcaagctccgcctcgcctcgctgacctgctctttgttgccttgctttttcccgccagtatcttcgcaacgtgatcctccagttcctcgagcacaaggagatgcgtgccaacctcgtccgcgtcctgtcggtcatcctccactttacgccgcaggagacgcggcggcttgtcgccaaggcgggctcatgaacatgaacgatgccagatggcttgacgacatctcctcggccgtgcagacaaggtggcatagggattaatcaggagggaggctggtggctgtcttggcggttggccggacgagcgacggctgaagccttgcagaggagtgactgcgcatctcgagcttgctcataagagaagctcctcgcaggcagcgacggtctcgagcgcttccgggttctagtcagtcgagataacgcgagggggtcagcaaagccgtcgatggctctcgacaagcgcagcaacacgtacctcgcgcagcgcactctagacgggctcccatgacagcacagcttggtcgccgacgtcgagcagacgcatctggtagtggtagagaaggcgctggacgtgggccgggaggcggccaaagaggtcaggcggcatatcggcgaaggtgttccgaggcaacgagcagcgaaagatgccaagctggcctaaaacgggctccttcgctaagccgaggtcgaactgctggaacgcgagcgaagcgaggtcgggcggatgacggaggagggcgagggcgaggatggccggggcgtgctcgtcgagaagccgggtagcctgggcaaggacgaggagcagcacgctgcgcgcctcaagcgactcagccatcttgcagagcctagtctcgggcagctctctgtcagcgtcgcttcagcagcggccggtgagaaagctgagcacgcgcaccgctgcagctcgtcaaagccggtgacctttgggctgtcgactggcggatgagcaaagaggaagaacttctcgaggtcgaccccaggctcgggaacgtcgaccaggatcaggcccgaggccgtatgtcgcttgctcatctcgccgctagagaacagagtctcaaagaaggcggaggccgtcacgactatgagcgatggaacgggaagcctcgcccgtcggccgagacgaccctgatgtcgcacgcgtcttcaaggacgacgcgttgttgcgagccgaggtccggcaggtcacatgaagcgctggatcccaaagcagcgagagaagcagtcagcagcagacttctcgagtcgtagatcgtcgaagggacacgcacgcaacgccagaggagcgggcggagggagcagcggcctgagctcgctttgctgtggtcgccgatgccccggccgtcgacgcgccgcgagtcgcagaggtcgtagcgaccatcgggacagcagcagacaggtgcgacgtccgagccgacgaagagctcgaggtcagcgggtttggcgagcgggagtcgtccagagctggacggtttggggttgcgataacggtggcctccatcgcgagcatgccgtcgtcgtcgtcgtcgccggcctcgacgtccatcccatcgacctcggacgacggctcgtatgatgaagacggagaggccgaggagaatctatcgctgagcttacaaggctgcaagaggtgtcctcccgaggtggctgtcgagagggagcgaacggccggccagcagctggttctctcgggcctggcgactgcgcgacagctcggcgacgcgtccctttgatgccctcctcctggtcgaccgccgcaaagtcctcctgacaaccgcacaagagacaggcgtcaagagagaagagatgtcatgtgaagatcaagccggacgagagcgatcctgcggtccgacgaggcaaggcgcttcggccacctccttctccttggccacttgagtcagtcgccggcgcacccttactctggcaggtcctctgtggaaattgagcgacagcgtcagacaaagggtcgcagggagggcaaagtcaagattcacgcactgggatcgagctggtagtcgaccagcatctggtcccagcgccgcttgaagagcgtcaggtcgaggccgccggctctcttgtcgagcatccgggccgccttgatccagcgcttgtggccgaggatgccatgggaatggagaaccgcggcgatgagcaggcacgagccgatcgcatggtcgacgagacccgggtcgatgggcgtctttggcttcagcgggagctgcttgtcgaacccaaggaggtcgccgcagccgatagcgatgaggccctgattctcccagtggatcgcaagtgctgcccactcgccacgcttggtgacgtttgtgtggacgagcgcatggagcgagcagaggttgccaagcgcatggtaggccgtccacatctggcggcgagtgcaggggtaggaggtcgaagcgtcagccgagtgcgcacgggaacagccttcccgttgacggcgaagacgcacctgccacttgtagtcctggcggcgctctgacgcgtaggtcgctttcaggctgaaagagggtcgcagatggtcagcgagaggcttcgacaggcacagggcatgccgaaggaaaagagctcactcgtcgacaatctcaatcatgacgcggtacgactcattgtggctaggcgggcccttgcacgtcgggtcccacgacgtcagcggaggcagctgaatcttgatctcgtcgagcaacgccgttcgctcggtgcgctcctcggccatgtcgagcctgtcctgcgtgcacgggatgcagtcgaccccgcagcgaatgccatgcttcccgagggcagccgtccgatcctcgtagccgcagccgctggcgtagctgatcgtcacctcgtcgccggccttgaggtcgcgcgtcgcgcggaggtacatcgactcgccgagaaagtcgaagcgggccgaggggttgcaggcgtggttggcgagcgagggcaggacgtagaggcctgcagggacgcgcgtccggatgccctcctcgccagggtagtcatcgtcggtcccgcgttcgaccgcgtagccgagccgtcgtcggccaaacgagttccacgtccggacggcctcgattcgagccgtgtcgatgtcgatcggggccgaggtgacgtcttcccggggtttgagccgggcaatcgagaagctctgtgggattggataggccgggccggcgtagaggaggccaaatacgtcggcgagcgaggggtcctccatcagccgacgggcaatcgtctgggtaaggtgcgcctgggcggtgccctcgaggttctccgagtgcaggttggcgcaggccatgtcgcgcccgtcaaggacgtcggcgtacgagcacgaggcgagcggcttgcacatcatgagcagctggccggcctgaatcgcccgattggcgacgagggcgcggccacgacccctgcggtcctcgatccggaggtcgggcaggatccagtcggcaatgtcgagcgctgggttggtctgcgactcgatgaagaggctctcccaggcatagctgcccgtctttgactctttgatgcgcgaggcgacgcggtcgaggccgtccttggcctccttcgaattagggttgcaggcgagcagctcggcaaagcgcgctttggcccgctcccacaattggagcgagtactcggccgtcgcagcccgaaagagcgccttctcgcgctgggcgagcgggagtgccgcccggtcaagcttgagcagcgagcgggcgtcggcgagcgaggagcgccacaggccagtcttgagtcgggcatggcagcggttcaggcggagggcgagatgagacgcgtcaatccggagaccctcactgcgccgtgccaagacgaaataagctcaagtcgtacagcggttcctggtcgtcggacgaggaggacgtacctgtacgcccggtcggccgggatcagccagcccttggacaggaagctgttcccgagcgccttgtattcgtcggccgtcagcgtctttggtcgctgttccgggagccggatcgccgggtccttccaggggaggcccttgaggtcaaggtcctcgttgagaaagacaaggtcggtcgggctgtcaacaaggacctgctcaaaggaggccgacgctgtcagcgaagcgagccatggcagagggcaatcaggcgaagcagcgacgtacgacaccgccgccggacgcgggcttgaggtagggctcgcgcacgatcaacgtcgacccgagcgggacaatggcgtccagctcgggaccgggcgagacgagcgcccagggcgacgagtagaggccgacgacgacagcgtcgccgcgcgggtcctggctgtgaaaggtaggcgtccatgtctgagctcgtcgcacattcatttggagtcgcaggccggccgtaccaaacgaagccgatgccgacaaccttgcaaaggcgcgagacgacgcggacgagcaggtaccgtccctcgtgacgtttgcgaagctggagactccggatctcgatccgcttgagctcagagagcggccgggtactatagtacttctgcggaccggcatagaggatcttgagcggctcatcctttgctgggtggacgggcggggagacggctaggggcgcgttgagctgccgggcgaggcggtcgtcgagcgtggcgatgagctcctgagcgggcttgactggagggagatcgccgtcagcagagcagtacagcttggctaggactctgccagcagacgtacgggtgctggtgagagaaggtggagccgggcgagcgagagcacgcgagagggggaggaggtcggagtcggtcagctgtcgtcatcgtctcgtgctccctctgccacagcctactggaggactggcaacgcactccggcttctttggcggcgtcgtccgctcctctgccagctcgcgctggaccgtgttcatccaagcgaggtagcgccggtcgtcggccggtttgactggcagcgagtcggcggcgggcgcaccgcctgggtctagaagcgagttcacgaggaggcagctcgcacacgagccgcagtggtcgacgggcggcagcgcgcctgccatcgagagagagatgaattgctcgctggcaggaagataaggtaaaggagaagatgggtccttgggcaggtcgtcaggcgggcgaggatctctccaagccgtcgccctccgctcgctcccgcgcagcacttcccttgtcgtcgtgcgtactcgacgaggtcactcgactctcgcacattgactgagtcggcataaaggcataagtagaattagattgggcgaattacggtattaaggaggccgatcagcggctagtctaaaggggtaagggttgagttgggcgcctcgaaaggcaccgctgcatcaaggccagagtcgatgaaggtgggtgcgcctggcgaaccagcacgcaggtgcgaggagagggtgaaaagcggagcgtattgctgctcactcacttgcctacgtctccagcagcagcagcggcagccgagcgttcgtcctctcggagttcaaggctctcacgcggagtttcgagcgccgccgcctgccgaagcctgtggacggcgccggcgccgggccctgttgtcggaggcacgccgccgtccgtcagcgttgaggggagggaggaggccgaggcggaagaggctgcgcgcgctcgggaggcggccgccgccgtcgacgaggaggttgcgccttcgctagcgacgatcggcgggccgagaaggacagcgctcggcgcggctccagccgcagcagtagcagctggccggtcagccgcgccgccgatcgagaggactgaagcgcgcgagttggctcggagccgttgcgcacgacctcccgtcccgccgagcgagtattcgctcgctgccgtgcccgcgcgcgggcgatttggtggcctcgcgggtgatcttgacggagccggtagtgaggagtcgatggcggtcggagccaaagcggcagacggagggctgaaggcggcgaatgacctcggcgttgcggttgcgccgacggggaggacggccatcgtcgaagggttggcggtgatgctcggtcgacgccggcttgtgccgctacttgacgcgactgagcccctccgggcggcctttggcggcggcgccagcggattggctgaggaagcatcgctgacgacgccagtcgtcgtcttctcctcagcggcggcggcggctgtcttctcgtcgaccgtgagcgggatcaggtggtgctcggcctgcgagccgagggcaagggcggcctgggagaagcagaaggtcagcggcagtgacagattagctggaaagcgacagcgctcggctaaacacacgatgacggggttagtgacgagaccgaggaggccgccgtagacgcccttgatcgcctgaagggcagagaggtgagaaagcaaggagccgtcagcgacaggatggggtcaagtggctgaccgaccagacgcacctgaggagcccagacatcacccatgtcgcccgttccatagatgggtccgaggatgacaacggccagacaccagaacggtaagccaaagacgacgccgatcgccaggccttggaggatcgtccagccgaaccgaccgagccgcgtcttgaatgagagcgagcgcgtgaggagcatgttgtgctcggtcccttcaaaagtaaagcggaggaacatgaggaggtagaagtagagcgatcgggcggggagcgtcgttgacgtcggagaggggtacttggtaacgtcggacgaaggcttcgggccgctggcggatgcggcagcatcggacggcgaggcgacagcggttgaagcggacgacaaggctgacgaggccgacgacgtgcttgcttcggtcgttgccggcgccggcggcttggcccgacccttccgcctcagactgtcgaagaacccggccgggtccggtaggtgttcaacgtgcgggtagacgaaagcgagcggccgaacggcccggtggtggaggtcggagtggacaagggtcgaggtgatcaagaatgacacggcgcactggatgagtggcgtcacgccgaggtcgccggcgatcgtgttctccgcgaagacccacatcttgacgtgcttctggttgtggtacactgagagggggaggagagaccggcgtcaggatatgtcaggggccgggggaggccaagcgcaaatgcaggggtcgtactggctgcagacgggtagggcaaggaggctcgtcaaaattgagctggcgttgtgtcctcgcgagctagagccgactcaccataggcgatgccaaagttggctcctgaggcgcggtcgaaggtgtgagatcggatgaaggtcggcatcagcacgggagggagtctgagtcgagatcagtcctcagcgagggcaacgtaccaaagtcgacgcacatggccgtcaggccctgcatgccaaacaggtagacgtcctgcctggccgtcagtggccaggggaacggcaggaaaagctcggcgaggacgcccatcgattgaagcgagcggagggcgacgagaggggcgagcgagggatcggccgttggctggcggtgcgtgcgggcggctggagagggttcggagccgaccgagggcgggtttgagtgcggtcgagagcgacgcgacgcgctgcgggtaacggctggaccttggcttgagctcttcaagctgttgaacagcggcgagcggggtgctgagacctggctgccgaatgcgcagggaaagacggaggctgggtgtcaggacggtctgggctcgacgaggtggcgtaagtcgaacgacactgcgctgccaggcgtcgacggggtagcagtagaggagttccttggttgctctaccagcgcgcgtcgtggtaagagaacgagctggactgacagctctcgacttgatgggcttgaggtcgtcgttggtcgttcaagggcgtctaggtggtcgttgggcgggaccagagcgaagcgacagcacaaccgagctgacctggcgagcgcggacgcgtcagcccttgcgcagtcaacgcgccggccacaactcgagtctcctctcgggcactcgcagctcttgcttgctcctgtactctctcttgcgtcatgcgcacaacgagcgagacgtgcgacggtgggggccagtcgggccaaaaaaaaccacgctgaaaaagacaccaagctgagcttcatagccgatttgaacgactgacctcgacattactagtgtcgcgctctaccgctgagctaatgaagccttcgaagaaagagtttttgatgattattcagtcgcaaaaaagaggtgtatctacatttaactggcattcaagctgtcaaaggtgtgaagaagagtacaggtgtgaagaagagtcagcagcgccagacgctattgactctgtgctcgcctgacagcaatcggcctccttccctgcgacaagctcggacgaatccgcgatgcggcaggcgcagagaagacgagggacgaggtcgtggcctgagcctcagcccagagcatcctcacatccgctcgatcgctctctctttccgcgcagaggagcgctcgctgtccacttgcagatagtcgccaggagggcctcccatacggcaaacgttggccagtgatctctgccaggtgcggagggtgtgaccagcgactactgtttgcctcggctgagctaatcatcatgcgcctctgcgtttccgttgtagtgccttgcgcgcgcgcgcgagacggctctccaaattctgtgggcgcgcagcgcgggggacgcgggcaggagagagagctcgcactcgacctgctctcgacgaccaacccgccctgctctctcgcctgcccttcttctgctcaagcagcctccgcctctagctgaattacagcagcgctcaagctcctctcacgctccaccgttctctcctctcgagcgtcgccggaatggacgccttgctagcgtcgaccgcgcccctcggcgggccctcgcgctcgtcccggccgtcctcctcctcggccggccacaagcgcaaggccaaggcctcggccgcgcacaagacggtcgtcaaggggcctgatggcgagcgtgtcgacccggtcgtccaccagatcggacccaacacgcggacgcccaagtcgctccactcatacgacgacctccggccgccgaagctcgcgcacgtcaaggacctcaagctccgggcgaagctctcgaaggtcgcgctcgacgagcagcgtgcggccaaggcgcgggacgaggcgacgatgctccatgagggccgggcggggatgatggagccctcgaccgagctcgagaagacgtacaaggtgtcgcaggccgaaatccgcgaggccggcggactggcggccgccgcaaaggggttcgacctcgacctcgacggcgggaacggtggcgtcgtcggccgctgggggagggatggccggtgcgttgctctcgtctgctccccagctttcgcagtggcgagcggctggctttggctgtcgttgcctgtgcctcccagatgtctcggaactgaccagacaccctcccctgcctcctctcccgcccatgctccatctgtcgacctactcctcgttccgttggccttttcttgctccaatctctcccccccgctcgttcccgatcaccgcaaccactacaggaacctcgcactcgtcaccaagcgcggacatgtctcgacgatgaacttccagtcggcgacgctcggctcggagatcttcctgaacgagacgtgtcgtgatgtgacgtgcgtcttctcccttcactcttctctgcgcttggaggaagcatgggcgcgaccgagcgaagtccagcgagctgattagcgtacctccctctctcggcatccgcgcgcgcgacaggtacctccactcgagctccttctttgccgtcgcccagaagaagcacgtctttatctacgatcaggacgggaccgagctccagtacgtccgctcagccgccttccgcagctcggagcactgacgccttgacctgtaccaaccttgcgccccgctcgcccgcctgcagcaagctcaaggaccacatcgagccgctccgactctcgttcctgccttatcactaccttttggcctcggtcggccagcccggccagctcaagtacaccgacacctcaaccggcgcgctcatcgcctcgcacaagacgcggctcggcgcctgctcagtcctcgaggtcgataaccagaatgctatcgtccacctcggccaccagaacggaaccgtcacgctctggagccccaacatgagcacgccgcatgtgcggctgctcgcccatctcggaccggtcgccagcgtcgcgatcgacgggagctcgggcagcctcggcaactacctttcgaccgctggactcgacggcaagctcaaaatctgggaccggcggaactggcagaagccgctcaaggagtggacgagccggcgtgagatccgctcgactgccttttctcagcgtggcttgcttgccgttgcgagcggctcgaccgtgcaagtctacgacaaccagatcacccggcgcgggggcaacgacaaccggggcatgtcgccctttgggccgacgccctacctgacgaatctcgtccagggtggcggggccaaggtcaacgacctcgccttctgcccgttcgaggacgtcctcggtgtcggtcacgacaagggcttcagcacgcttctcgtccccggtgccggagagcccaactttgacagcggcgagggcgacatgtacgagagctcagcccggcgcaaggagcgcgaggtccgcaacgtcatggagaagatccagcccgatctcatcacgatggacccgtcgtcgctcgggtcgatcgctccggcgaccaagtttacgcacctccctcagtcaaccaagccagtgcccttctcaaagatgccgcggatcgaccggctcaaagccaacgacgcaattgaggacgacccggccgaccttgtgccgtcgtccgacgaggaggggctcgcggccgacgacgacgagggccggaagcgggcccgggtcgagaaggagaccaagaagatgcgcggcaagaacaagtcgctcaagcgcttcctccgcaagaagaagaagaacgtcgtcgacccgacgacggtgagtccctcgctcttgcacctcccgctacttctgtacccgtcactgacgctcctttaaccaatgacctctctcttgcagatcgccatcaaggagcgcctctcgcgcgagcgcgacctccggactcaggccaagacgccaaaggtcgacgagggcgcgctcagccgcttcagccgctgagaaggggtcgggaggggcacgacgtgatgacagttgggtcggacgggctgctcatcgcatgattccttcgatgtcgatccatcttgcggccgtgagtcgatccgtcgatgctcggattctccagcagccctgtccgtccatctcatcttctcagtcgacgtagggaatgaagtttgcagcagctccaacgcaggcagcgctgtcaaacacgcaagtcggccatcgtccgaggcgccgctgtcggccgcctcgagaccacgcttcagcgagcgagcgagacaaaggtacatgatcacagaaggtcaacaggagaggcaacgtatcgagtgggcgcagcgcgcagcggaggcgaagagtcgaagatgaacacgaaagagaaggtacacaagctgaaaggaaggcggccgtccactttcaccacaatgacgggtaagcggagaggttggagccgtcggatgcgacgtcgatgccgatgctgaatgggctctcgccggtgaccccgcttgtgacaccgcccgggccgacgccgtcaaacgagccgaatgcaccgggtccgaagaggctgtggatgaggccctcgtcaacgccctcgagaccaggcagtgatgcgtagttcggcgtcctgagttcgtcccgcgtcttgagcggcggcgggtcatgcggcggtcgggataggtagtcttctggcgacgagacgggtgagaaagctgagccaggcatcgagctcggcgagacggtcggggcggtagatgtgactcggccgccggacgagctgccgctgctgatctcggccacaaagcctgtgccgttggccgcccatgcagagggactgtacgagtgcggcgagctcgttgcggcggggctcgcaccgtccgatgctgagacggccgacaagtgcgctgtcgacagctgcgtgggcaccttcttggtctcggaggcctgcccgtcggatggtgggttggggatcgaatcagccctttgtggtgataggcgcaggagacaagcgcagggccatacgttgctgggaacggcgatcgggcagagatacggcgcacgcatcggttcggcgctcaaggcgtcctggatggcctggtcgagcagggccgcctgacgctgggcgacgggctacgcggcgaggtaaaagagtcgagtgtcagagccacgccgcaagagggttcacgagcatccgggacgcacaatcttctcggcgaggttgtacaaggccattcggaacatggcgagctcgctgttgagcgtcttgacggcaaattcgtccttgacaaacgacgccgcctgcaggaagcgcgcgagcgtccggccggcgacgtaccacgtaaagacgaggaacggagggaggcgcatgacgtcaaagttggtcgagaagatggtgaagagcagcgaaagctgggctggaggagggtgaaggggccaagggcaagtcggtcagctcgggggcgagcaaagttacacctcagcagagacgcaccgcgggcggcagccagaatgtaggccgacgaggggtcgccaaaagccatcagattgacgtgatgctcgtgcagggtgattgccgcggtgtagacgagagcgtgagcgaagataaggttcgggtcgatgccggtcccctcctgggtgaccttgggtagcgtcgtccgaaagagctctacctgtgactgcaccatgcgccaggcaccggtagctttcagccgttcatgtccggcgtcatcctggccgaccgtggcgagcccgctctctttgagcgtccgccggttgaagtgcttaacgcgcgcgaggaggatgaccgccttgagcgagaggacgtagccgtcggtcgtcgcaggatagtggctcgaaaataggtttggcgaccgcagcgtctgtgtgttctccttcatcagggtctgcggcgcgtaaaaaaaaagggtcgaggaagagcaattaatcagccaaatgttgagaaggcagagagcgagattgaggacgcacgccgcgcgcaaactcggccaacgacgtcggtagctcgaccgtgacgtccgcctcctcgaggctatgcggccagccgctcgagatgctcgccagccggtcgcaaatgaaggcggaccagaaaacgcggcgccggctctcgcgctcgatggcgtcctcggctggaaggaggaggcctggcttgcagccggcgatgacgaccgagtcggttgcctcgttgatgccaagcgggatgcacttacgaagagcgccggccgacgactgccagatctggatccagcgcgcgtgcaaaaagtcaaagttgctcaggataacgtgggctgaatcgccgagatggaaaaggctttgtcagcagtggacaggacggcgctcagatcggcgaaaagcgcagatagagagggcggcgtaccgattgtgacctcgaagagccgctcagcgcaggcgatgccgatctcgatctcctccgcagcccagatcgcgtgcctcgcgccaaaggactccttgtcgagcggatcggccaagcccaaacgattcgcccgagccgagtcgggtgctgaagtcgacagaggtggaggcgcaaaggacgccgaggcaggaggctcgtgcggcgaagtcaggcccgagtaacgagcggtcagggcgcacatggcctgacgggaagcaggacgtcagcagtgagaaaaacgacggacaaacaagttcggaggggcgcacgtggaggatggcgacgtgaggaaagagtcggtcgtcaggaccccgttggaggtcgcgcatgaatgacggccgatggaggagacccgagatgccgagagggactcggtcccagaaggtcgtcactaggctgagtagaagccgcggcggcggcaagcgaggagggtacgaggacggaagcaggtctgtcgaccggccagagtagtcggcctcagatggtggtgcagactgggagtcgatctcgaccccgggccacgagtcgtcgaggccggtcgtctggccgaacggcgtgggcgggtcgaagaagttggacggggtgaaggctggcggcccagcctggtcgtacggccctccggttccggctgctgctgcgaccttgttgaccttggagttcgagagcacagggactcgctcggagagcgactgagggtaggcctgcgaggctgggccaggcacgaagagtgaagcgcctggcacggacgatggccgcggaagctcagcgacggacgaggcgaggtctgccagaggccggacgccgagcgagccaaggagcgcctccatgtggcggaccttcttctcgagcgcccggacgtggtcggcgtccatggtgctgccggcggcggtcgttgtcgacggctcaacttgttcgcggcggccgtcgacgctgtcactgctctcgcccccgctcggatcctcactcgccgcagcgaccgctcggcgcttcgtcttaggcgcgatgatggtcctggccgagctgctcggtcccgatgcgccgttatctcctccctcgccgtcaccgactcgctgccgcttggcccgtttgggcgccttctcggggtcccagctgcagtctggcccggccaatgccgccggaccgttcggctctacgctcagctggaggccgtgatgcttgatgcaggccgagcagtgcggcttgatggcgtcgcacttgagcttgtgcttccggcagcgcaagcaagcggaccctctctttacgggcgcagtcagcggctggccccgggagccgacggccggccgttgctgctgctgcgaggctgaagacgtgtcgacgttgcggttgccggcatcaaagctactgccttcgctactggagctgcctgttgtgggcagcggtggacggaggctggtgctgggagcggcagccccggctccgtcgcgcagcacgggcggcgccgtttggaagagcgagaggtagttgctcgaagaggaggaggttccgtagacggtcggaggagggtacgacatggctgccgtcggagctcttgagaagacgaagacgagcgtcgaccgtcctgcactggaacaagtacgggaggggggatggtggcttgaggttcgaagtttacccgagctggggttgctgatcaagccgagctgggcgtgcgagagacgagtacgacgaaacggtcggctgcgagtgcgggatctctgcagctggaaagagaagctgcgacgttgtggtaggatggtgtggctgctgagagctcgacagcgccaacgagccagcacgacgacaggaggagccgaacggcgacggaggcaagtgtcagccgcatcgccgcgcgttctgggatgcccggatgcccgagctttcgtatttttactcctttcggcagcaccacctcctctgatagactgcgttctcaagggcgagattcgatctcctgctgctgctgcaagaaacttttcaaggcataagccatgtcatcaagggcagcgccccggttgtgcgctcgccagacatctggccccggacactcgctcaggccgccgccgccgccgactggccgccaccgatctcagcctgctcactgccaggcgtcggcgtacgcgtcgcctttggctcggcccctgctgccgtagttgtgggcagcgcgcgcgactcgccgagcgcgagaggcgagttgaggagcgcggcgtcggacgcgagcggcggcttcccctcctctggctggtcggcaaccttggccgtgcgctgcgtcaccttgctgccgttgccgctggccgtcgtcgctgttgaggcgtgcgagtgggccgtgcttgaggctgttgaggtggccgacgtcgccggcgagggcgctgagctcatgtgggccatctccttcttgagcgcctcgagctcgcgctcaaacctagacgaggcagatcggaagttgatcgtcagcgggccattacaatgagcaagcgggcttctggaacccacttgcggccccagacctcgacatagaagttggcacctgacgggaagcgagacgtcagcttactggtcgaggcgagaggcggcccaaggagctcaccgttccaggtcgcggccgcgaagagggcaatcaggtaggcgcccgaccacgccggcgacttccaaaggtaaaagacggcgggcgaaaaggtgacgatcgtgtagacgagctgccagaacatgaagaggctctcgcgcttctcgggcggcgtcgcccgcatccacttgccgatcgggttgtgcttgtcctgcaagaggctgggcgaagggtggtgacggcggccgagtcagcgcggatactacgggacacttgttgcgggggggacgtactgcgagaacgagttgacgcgggtgccagacgtgatcttctctcgcttggcgaccatgacaaactgccagtaggcggcctgccagacgatatctgcgtggagcggcgaggtcagccgcgtcggagactgcaagagacgcatttgcgcggagggacgtacagaagccgacgcctagcgacatcatttgccaccagctgatgccgccgatccgctggatggccggccagcgctcctcgcggcccgggtagaagtgaaggatgacggtcatcgtgaagggcgggtctgcggtcgtcaaccgggggcggggggcagggaggggtgatcagctgccgatgtgcgcaaggcagaccaggaggagcaggcgacagacagatgtggatgaagagactcgtgaccttgtcgagcgagtggaagacaagcgaatttcgccaggtgacgatggcgctcgcgagagggcccatcgtcaggaggtagcacgaggtgaagaagactgtgttggccgggaaggcccacatccagacgaggtcgagaatgttgacgtctgtcgcggagggaagggataaagaggcttcaggacggggacgaacaagcgcgagcaagagagagggggccaacaatagcacatgtcaaacaggaagtagtgaaactctttgcgcttgtacgaccagatccgcagcggcaggtagaaggcgctctggacggtgctgcgaggtggcagagggggtgtcagacggtcggtcagctcgcgtgcttcagacggcgcgtttcgaggccgacggacgcactaccagatggggatccactcggggcagaggccgaacatcagggccgacgtgaggaccgtcatgaccccaaagaagaatgacaccttgtcgcgcgtccggagcgtacgggacgactcccagctctgcgtcaggtggacgagacgcgacgacacctggcgattggacggcagaggaaggatgtcagcccacatgctgagttactcgtcaagattgaccgcaatggaaggcgacgccgacaccgcagcgccccttgagaaccgggacgcaccttgctccggaacttgcgcagctcgcggtcggcgagcagccacttctcgcgctcggacctatgcttgctgtcatggccctgcccggccgtagcagatgggtctagcgcgccgagcgacgccaggtccgtcgacgaggccgtgcgcgagccggttgccgtcgtcgggcgggtccggccttcggtcggctcatcgtcgaggtcgtcggccgggtcgtcggcggcgaagatccgaggactcttgggcgcgaggctccggacggtcctgcgaggcatccacgagtcgaccgtcagcagctgtccaggcgatgacggcaaggcatagggacggacgagaggttcttcgagatgacctcaccggccttgctcttgagccggtcagagtgcgaccgcagccggcgctcgatgaggtcgagccgcgagtcaaagaaggtctcgatgatatctgccaggggttcggcgagatatatcagtcgctgcaaggctggctcaagatgagccggacgtaccgagcaaaaccatgccgtcgccgatagagcctgagccgtcgtcctgggacgagcctaggaaggacgagccgcgcgagagtatgccacgaataggccgcctgtgctggctgtcggctgcctgtgctggcggagctgcggacgacatttgctgcgtcgacttgctgagaggatggagagatgggcggagagggtcgcagaggaaggtgaggcgtcggcgtggactgctgagccggccggccggttcgtcggcggaggcgagtttcggcctctgccgctagctcaaggatgacgcgttactcttgacctacaatcttcagccgtcgacctctttccacaaccgggctcgtgctcgctacgagcctcgggagtcatcctgcccggccggctgctctgaccaaaacgagggctgccgtcgccggcgctggcttgctgcagctgagggtgcactcgttcccgacgcgacgtgctgcccgaccaccgtccacctgtgcctgcttgaattccgacgacgggacggactcggagctcatggattatgaagcgcgggtgcgaaagagggcgagatggatacagcaggctgggagaggggcggtcaagatgacacgggctgacacggtcaagagacgactggacgcgctgagtcgacgcgcgactactggagcttggaccggagggtgtcggcaagggtctggccatcccgtccgaattggcggatgccctcgtggagcttttcgaaagccatctggtcctcgaggagggaccagcggaactcgggctcgttgtcaatgtacgagaccttggccatcgacttgtcctgcttggccgtctcggcgacgagcacctgcttgacctcgtcggtcgagttcttgagctcctcgagcagcttgggggcgatcgtcaggtagtcgacgccggcaagggcctgcagagcacggagaaggagaatgggaggcggttcagcgcgcggatgctgggtcatcgctacagatcgtcgtcgactgaccttgatctctccgacgttgcggaacgaggcgcccatgacgatggtggggctgcggacgaagagtcagtacggacggcgcgagcttcacaacaagagcgggcggacgcactagccgtgctgcttgtagtagttgaagatcttggtgacggaaatgactccggggtcctcggagccctcgtacgtcttgccggtcgaggccttgtaccagtccatgatgcggccgacaaagggcgagatgagggtaacgccagcctcggcacaggcgacggcctggccaaagccaaagaggagggtgaggttgcagtggatgtcgagctccttctcgaggtagcgggcagcctggatgccctcccaggtcgaggcaatcttgatgaggacccggtccttcgagacaccgaccgactcgtagagagcaatgagcgtcttggcctgaagcggagggaggagcgagcgtcagaaggagcgcatgtgcgccgggcgtgggcggtggaccgaccttcgcgatggtcgcctccttgtcgaaagacaggcgggcgtcaacctcggtcgagacacggccggggatcagggcgaggatctgcttgccgaactcgacaagctgagcgggtcagggagagggggggtgaggtcagcctcggagatagagcggagatgggggcgggtgggcggttcggcaggcgcgcgctgacgtcgcctggcgagaaagtcggcactcacgaggcggtcggtagcgttctccacctgggtgtcaaggtcactggagggcgagggagaggggtagcggtcagtgtctgtcgcccccgggagcgcctctgcctctctgcgccgacagccgagtgcccaacgacgcaaggtcgagcggagaaagatagacttacccgcccttcgatttggcgtactccagggcaggcgtgaacagcttggcatacttctcctccttggtagcggcgaggatcagggacgggttggtcgtagcgtcttggggctcgtagacagcgatgctctcaaagtcgccgctgtcggagacgacaacggtgccggaagccttgagttgctcgagcgagttggacatcttgaggatgggctttgattgaaagggggtcgataagtagcgagacgagaaaacgagagtcgaaggagggtcacgggcgaaagcgggtcagcgagatagccccggaaaggggcgcgcgcgcgtcaggctgctgctcggcagcctggtaggacgccgcgggaaaggacacacctgtcggtggaggatgggccgttggtcggaagaaagatcgatcaggagggtcaagaaggaacgaggcgtcaaagacggagaaacggaggacgtcagctctctgcaggacaaagcgcgcgcctcttctggtcttcgccgagcgagctcaatggctgccgcaggagagaagacacaccttgtgaaaggggttggtgaggtgggaggcagttgtagatgaggtggtgggagttggaggaggaggagggcgccgacgttgcagcttgcgtcgccgtccgcgcaaagttcgttacggcctggttacgagtgacgaaggcacaatcgtgcgttccccgccctcgccgtctccgggccgagccggagggagcggccgttcagccgcaagagacgagtcggttgccgccctctccggcggcccctcgttccccctcgctcctcaaggtcgtcatccaatgccgcctcgtcatcagcaattttgtgcggctctgacgacgtccgtcccctctgcttgcgctggccgttgccgccggcagttgctcctgcacgagaggctgcgggggtgtaatttttcgagccgacttaccggccgttgagcggctcaggacggcactcgcccgctccgccctcggaagggaccggacgagggtccgtctatcgctttgcgtccggcagcgatatgctctggctactcttcactgccatgtcgccgccctcgctcgcggatagacgtgaatgctgttcatacagtgtgattaccgggaagctctaaagttgaggggtgacatccagggttgggacgaagtggggggtgtagtagagatgtaatgaggaggaacgaagtgttgggttgggtggacaaagtgaggggtcgatgcaaagggggggggggctgcaggaaaggatggagatgcaggtccgcgattagaccgccatctgtcccttggcttcggcagcgttgtgccgggcgcggacctcggcctcctcgctgttgttggcgtgggtgtcgatgccacccgagccggtggtctgctcaatatcaacgtcagcgggcagctggaccttctcgttgccgccttccgtcgacttctcgtcgtcagggttcttcttggcgccagtgttgagcgaggcatagtgcgacgaggcccggatccgggcgccgtacttgaagaggacaaagggcaagggggcgatgcagaagccgatgagagcgagcaggaggccggcaaactgctggcccatgccaaggaacctggaggagggcgggagcgtcagcaacgcacggcaacttgacaagggaaggcgacgtacatctggcgagcgaacagcgggaagctggctgcgaacatgttccgcatgaagccctggccggcgatggcggacgaggccatgtcctggtatgagtcggacgtgtacgagtaaacggcaaggaagatgtggtagatgccgaggatgatgaggacgagggcgacgcaggggcccatccagtggcctctctcctctctctgatagccctccgagatcaaagcgtcgatggccgacggcgtcctgacgatcacctacccgaaggcggcggccgtcccggacgatcagctggtcccgatcgagtaaagcgcggctcctcacggccccgtctcaggcttcaccctcctctcatgtacctcggtctctcttccttgcactatcatcccatgtacccctgaatgcgattcttgatcaggctgctcaggcccgctgctcccgcgccgcttcagctctcttttgcgacccctcgacttgctcgagcgaggcgtctcaccgctccaggaagagcatacaaaaaggcagggctacaaatgggaggcgattgcggacaggtgggacgggctggcccttagttatagtcgggcgtcggaagggcgatgcctgggaaagaaggggtaggcactcgaggtcagatctcgagttgagagaagaagaagcgccggacgcaccgatacgcttgtgccgctcccgccgggtctcctcgaccgggagttcaaagtagccgtagccatcgagcgtctcctcggcggcggcctggaggagctcggcctcgtcaatctcgtcgagcccgttcagccgccggccgcccttgacgaggaccgtcggcttcttggccgccgatccgccgttggcgagcccggcctcggcggcgacgcgcgtcagcgacgggatgacaggcgtcgcgaccgtcttgggcgacttgttggcctcaacgtagagctggacgatcattcgctggaggtcgaccaggacggcctggagcgtgtcgagaaagcggcgcgtctgcaggtgcttggacgccgcacagatcgacaggcccgactccttgatgatgtagctggacggcgcgggaggcaacgtcaacgagtcagcggcaggtcagcgagcagccactcgcgagacgcgcgacacacccgatgccatagccctcgggcgtcacctctgcgaagccaaagagccgcagggccgggttcccgcagtttgacgtcgagaggacagaggttgacaggacgccatagccaggatcgctaaagagatcgggcatcggctgcgtctcgggtgtcgacgagcgaccgtcagcagacggcgtcgtcgagctcgccgccgacgagagctcgcgctggaacaggcagtagagcgcatagaggtgcctgcagagaagggaatgccggggcatgtcaggtcactgaaagcccaacaagtgcgaccgctcggaagacgcaccgatcctggccgaggccctggctgcactctttggtaatctcggtgtgcgtcttgcaggctttgcgcagcgcggcaatcttgtcgctcgcgcttgcgctcgtgcagaagagctgcgcacagagaaggtcagcgtccgaggcgaggccgtcatcgagctagaatccgcaccttggtaaaggcaaccgagtcgggctggacggtccggatcgactcggtgcggccgcggcggaaggccttggtcattgccggctcgtacgtgctctcgatgcggcctgacaaagagacaagggttggtcaagtcgaggctcggcgctcaaccaagtaagcggaatcatcgctcaccgtaaaggctatagtaggccgcctggaaggccatctgcacaaaggcgtcgggactgaagccgtgtcgagtgactgtcggacgcaagctgggggtcagcgtctgtcgagatcgatgaccgcccttcaggacccgactcactaaactccttgccgaagccagcgaactcgagcgcctcaatttcgtgctggcagatgaggtcgctcagccgcgtctcggcaaagcggatgcccatccggatctcgctcgtcaagtgccacgtcagctttttcggcgccgtgtcgagctcgtcggcgtcttctggcagctcaggccgcttgcccttgaacgagcgggcaaagggcgacagcttggcgccgaagagcgtcggcgaggccgggttgattgacttcgcaaagagcaggacgagatccgtgtagatgtcagccgcgtaccgcaagacagtgtctggcgaatgagcaggtggcgtcagcgctgatctgggtctggagagaggccagaggccggcgaaggggactcacgaccgtcgacgcccgtgtgctcgaagttgatcccggcctcgccatcggcgcagacgatgatctgaagcttgtcgtacctgcacggcgagcaagctagagtcaggggtagaaagacaatgtattggaagtgccacgtaccatcggttcgtgcatgtcccgacctggacgccactctcgagtttgtagctgccgcagagcatagcctcacagacgccgccgatgccgcgctcgccctgtgggacgaaacggagccgtcagcagtcgacgagattgcgcaggcgtcgacagagagaggccacgtacaatccgctcgtcgtcgtcgaggcagacgacaaacagcgcattgtcgacgacggcgaggcaggccgcattgtgctcgtcgctggtgagcgagttgcggagcttcgaccagagcgtccgattctcggtcgctgtacgcaagcggacagagcaccggtcagtcaacaaggagtctgaaaccgcttgtagagagagagcgccacttactgaggacaccgaccgctccccgagcggcctcgttggcagccgtcttgtcggcgtcatcgacaattgcccgcagatggcgctggatctcgcgctcggtgacgagcggctggttctcgctgtcgagcagcgtcatgtaatctggcaggagacagcagcgtcagctcctactctacgcactcagcctcggcgctctctcggaacgcacagatctgcccgcgccggatgacgacgacgtgccggctcgtgctatcggtcgtcatctcgcagccgcccttgccgcgaggcacgcgcgacgtgccaaacagccgctcgtactggctcatatcgagcggcttgccaccgcgaaggacgtcgggcgcgagctggccggtccggaggtcgtgaatgaacgagagagacgagaggatgagcgatgacgcgcgtgtaagctggacgtggttcggcgggacgagcggcgcggtcgacgggccggtcgtcgatgacgaaggcggcggaggcggcggggcaggcgtcggcgattgcgagaggatgaagaaggggttgagagacaagacgacctgatggtgcgtggccaagggaagcgaagcgggggagcatgcgcagcagcggaaagcggagagacagcgtgtcagcgagagcgacgccttccgttctggggttcgcaggctgtaacagcgacgtaccgactcggtctggccgagatagctctcgtaccagaattcttcgatgtagctgtcgtgctcgcagtcgtacgcgatcagggcgtcctggaggcgcgggccctgggccgggtcggcgaggaagcgctcggccgcgtgcttcgtcttggcgtgctcctcatcggtctacgcaggtcggtcgggaaggaggtcagctgctgctgctgctgccaggacagcgagagcgcttgggtgggccggcgatgaatagagacgaggcagagtgacgtacttggaggccctgcggagggacgcccgacaagcccgagcgtggaaggggtcagcatctcgccatctggcctcgatctcgcccctcaagttgagccacacgcacctctagagctcggagatagcgccggaccgtgtcctcgagcttgggcacgggcagcttgggcagctcgtcctccttggtggccggcggcttcgagctgacggtgagctggctcggcagcatctcgtgcgggtcgggctggtcgggcgaggtcgagaggggagggagaggagaggggtggcaattcggagcgaggtatcagactgtggctgagatgggtgaggaaacggtggtaagagaagagaaggtgcgatggcaaggtggacgacgtctgggctgatgaaggggccgcgcacgggtcacgccggccttcgcgacggccccgcgtcttctcccgacgagccgtgtctccccgaacaacgtccgacgcattctcgcccgcctgcacatagagtcggcctcgggtcgtcctgggtatcccgagtcgttcgcatcgtgcgcgattgttcgcgggaaggcacttcggccgtcaacctcaaccctcccgtctcccttctcgaactgcgctccccccgcaagccgctgtcgacagtgttacatgtgattacagatcgtctggcagggcaagcgttgcgggcaggagatgaaaaggagcggacgataggcgggagaacacgcggcgagaagaggcggttcaggcagagtcgggtcaaagcaagagtcggttgatcgccgttgctcgagcgccgtctaccagtaaatgcggtgggtggggcctgagcgttcggaagagaaagaaaatcagccgcgagtcaaacagcttgagctggaaaacgaggacgtacactggtagccagacgggttgttgtcgaggtactcctggtggtagtcctagagaagagcgcaaacgaggggagacgtcaggcgcggtcgggatgtctgcgccgtgccgcaacgacgcacctccgcagggaaccactgattggccggcttgatctcggtgacgaccttcttgcccttggggtcaaagtacttttcctggacctcggccttgacggccgacgcgatctgctcctgctcgggcgagtcgtagaagatagccgagcggtactgcgagccgcggtcggggccctggcggtcgaccgtcgtcgggtcgtgcgtccggaagaggaactgcgcaagggcgcgagcgagaggagaatccgtcgggcgatcagcatcgacttgcaggtgcgagtgagacagatagaaggacgcacctcgacgagctcggcatagctgacctccttggggtcaaacgtcaccttgacgccctcggcgtggccagtcctgccagagcagacctggcggtagcctgatcacggggggttagatcgaatcgggtcgcaggtgggaccaggatagaagagttgatgaaggaccggccgaaacgattcagccgatcggaaagggtgcgcagagggcaagggtgtggccaggtgggacgaaacgaagcgagccagcaggcggtggcgaacgaagcgcgagggatcgggcgggagggaagaagggataggagggagacgaagaatgggctaagtcacacatcctctcccagagcaaggggagcgaagcagggtggggcaagaggcggcgggcgtcgacgggcagcaccgatggaggagcactggcacaagtcgacgccgtctgggaagcgggcagggacgcactaggggtaccgagcgagaggtcgccgccagtatagccgacctccgacttgtagccgtttccaccgcggaagtacttgtcaaactcatgggccgttccccagaagcctgagcgatggaaagagcagcagaggaaatgagatcacacgatgacggacgggcgttggtcagcaacgcttttcaccccgcagccggcgagcagcccgtcctccaggtcaatccagacgagactgagctcgcaagcaagctcgctgagcgaccgactggtctaccctgaccttcgcaagcccccaggctgctgccaatggagcagacgactcacagccattggcgccgtagaactgctggagcgggccgctctcggtgagctggagcctggcctcctttgcggcgatcgacgtcggcacggtcggctcgagcggcgttttgggagccttggtcatggcggtcgtaaaggtggctgtcgacgagaggaagggcaggaaggagcgtaggcgggggagcataagaaaggtgatggtagggggagagaaaggtgggcaggcggtggtggtcgtgtggaagctggccatcggagagcgcgcgcgcacgccagtgccggcggagaccggccggccggacgaaacgaagctcgacgagccggccgccatgcggttgaccgctcgcccataaccatgaccttcgccttcaccatgcttttgctgacagcaaggctgcgaggctgacgccgagtacgcaagagggccagagccgacctctctgacgacgtcctgcaggctgcactgctcaagccgacatcgttgcggtcgacgcgctcgtcgctccggcggccgcggcggacgactcgagccgaccactccgccggaggcacaaagaggccgacgatcgaagagttgccaatgacgcgaggggcccctttcgagctcgccattattcgttcgacgacaggaagaagggacctccgcagtttcctcctcgacctcttgaccgtctctctgttcctcaacagccatcccttcccgtctaaccgaagctcttgtcgactgtcagcccaacatgaaagacacctcccccgtcgtccgccggtcctgtgcgtcccagcctggctcgttcggtgctccaccaccaccaaggagctcgcttgacctgctctccttggcgcgttcgactacgcgctaaccacctcgacgcctgctgctctgctgctctgtctctctttcgctctgtgcagtctaccgctcggtgccgttccaggtgcgctcggcctgcgggcggcaaagagcccctccaggtcccgttgctgaccctgttcacaatgcctgtaacgacctgctcagatcctcgttgctggagcggtcagctttaccgcgccgggaatgtggtgcgtattccgtcaacacgagtaggaggaagaacaggacaaggcgctgatcctgcttttcctactggtcgtagggacgcccttggtggtcttggagccggaggcgcggccgagccgtacgccgtctccgcagccagtgcgtctcctgcctctcctcgcccagcgttgtctccagctccgaggcggctactgacctcactcgtccgacagacgccatcgtctacggcctgttcgccgtcgtcgcggtcacatccggtgccatcaacaaccgcatcggcctcaagtgggctctgttcctaggatcgctgggagtgcgtcgcttgctctctctttgccctgcgtattcgatcctggctgactttgcccgcacccgacaacgacagtaccctatctacgtgcggcctatcgtttctccatagtcagccataagctgcgagctgacctctctcgctttgcctgttttcagggaggaggtctctacgccaacaaccagacggcctcgaccggcgtgatgttcttcggcgccgtcatgtgcggcctctcggccggcttcttctggtcgagcgaggctgcgatcgtcattggctagtacgtcctcgtcgagcgggacgcgacagtgaagccgtgcgaacctagctgaccttgcttgcctcatccagcccttccccgaaggagcgcggcttttacctcgcctgctggcagacagccaaggcctcgggccccatcgtaggaggtgccatcaaccttggtcttaacgtcaaccgtaacggcgccggctcggtcgggtgcgcaacgctcctttactgccttgaagcgacatttcgactgactgttcctctttgcctgctttgcagctcggctacctacatcgtcttcatcgtcatcatgtgcctcggtgcgccgatctcgctcctgctctcgcccgccgagaaggtctggcgcaaggatggctcaaaggtcatcatccgcaaggaggccacctggtgggccgagttcaccgccctcggccggctgatgatctcgaagcgtatcatcctgctctaccctggtccgttcggcgtcgacgtgctctcggtctcctgtgcgcgcctgagctgacatggccgctcgccctcgccagccttcttcatctcgtacttctacaaccctttcctctcgacgttcctcaccaagtactttaccgtccggtcgcgagcgtgcgtctctgctcccgctgcatcacagcttacttgatccggctgacatgctcttcctccgcagcttctcgtcgttcctgaccaactttgccggcatcttctcgtcgttcatccttggctactttgtcgacaagcagtcgattaacatcaagacgcgcgccaaggttgcctttgtgcgtgccgccctctccgtgcttactctggtggttccagctccaagctgacctccccttcctcgcgcaggcctcgatcgcgacaatcctgatcggtacctgggtctgggccatcatcctccagaaggagtactacgacaacaagcccctgctcgactggacgtcgtccgagtttggccgggcctacgccctcgtcttcttttggacgtttgccggccaggccttccagcagttcctctattggctcgtcggccagtacgcgaccgacctctcggacctctcgcgccacaccggtgtcctccgcggcgtcgaggccctcggccagacggtcgcgtgggcgatgcagtccgaagccaacgtcaaccactttgtctcgatcggcctcaactttggcatcctcctgatcgcgatcccgccgacgtggtacgtcctctgccagctcgagcacactctagaggcccgcgcggccgaaaccgactcgcagacgggcacgatcgtcgacggcaccgcctcggacgacgcaaagcacccgagcgcccttccgccgccgccgttccctcacgtttagattaagggcaagcaccaccggctcgcgggccttccggacatactctcccttcaccagcagttcaacctcctctcatagatgtagcgcctctctccttaacgacttatggacgtcctttctcacgctcgcgcctgagtcatgtcgtaagcaggcagcagagcagtcgttggatcgagcacggaatacaacggagatgaatcgtccctaggcgtcacaaaaagatcctctccctgagctgctcaacagcagccgcccttcgtcttgcccgcagcagcgcccgcctcgccgagcttgataccgcctttccggccgtcgcccttcttgccctttgcgtcgagctggccttcgaggatctttgcaaggatcgcgcgggcggtcgagtcgaaggcgactggcgggcgcgaatgggatggcgagaaagacgtcaagttggccgctgtgctacaccagacaaggagagcgtgcagacgacgaagaggacgcactttggacgttctcgcctgtcttcgcggacgtctcgaggaagaggagcgactcgcgcgcggcaaacgccgagccctcggccgttgtcacgcgtgtcgacgagccagcaccagcgacagcaacagcagatgtcgcttctgcttctgtaagctcagcgtcgtcggcggcggctgtggacggtgtgagcggggcgaggtcggccttgttgccgatgaggataattgagacttcggggtcggcatgcgctcggatgtcggctagccagctcgggactggttccgcgagaaacgcagattgtcagctccagtcttgaacaagcgaggtgcgagacccccgtgcgtgcgcaagacactcggactgagagtggccctcgaagcgggacgacgcactctgctcaaacgtctctcgccgcgtgacgtcgtagacgagcagtgcgcccgccgcgccccggtaatagctcctcgtgacggctcggaagctcggcgagccggcgacgtcccagcactggagcttgatccacttggcttccgcgtcgtcgtcggcggcggcggaggccggcggcgctggaggtagtgctggtggtgatggtgaggaggacgaggacgaggtcgggtcggcggagctggagggagctgaaggtggtgccacacgaaggagcttcgatccaaactcgacgcctatcgttggatccggctggccgagggtgcaggtgggggtgcctgtcagcactcgagcgagagtcggacaagagcgagcgtctagcagcggcggtggtggccgactgaccgtcgtaaggaatctctcgtccgtcaacctgaagagaatcgacgtcttgccaacactcgcctcgcccgcaatcacgaacctgggtggaatatgggggagcgagggagtcagcctcgttgcccgttcgacagggagcaggcttgaatccggacgagattggaggcgcacttcatgatgctgtgcgggcggttgccgtggcgatcagagagcagggttcgtcagcgaccagcagcttacaccaagacagccagatagacggccgtactagtcccaagacatgctgggcaagagtagaagatgatggtggacgtgcaactgatgcttgccctgggtgggctgcgcttggctctgatgcattaccaccgattttgatgcaggaggccggccgggagcttcgcttttcagcccgcgtcggctgtttcgagctcgcgtccctccgaccgccatccttgcctcggtacgtctctcttcgcttctcaaacgaatcgacaacaccctccttcttccccctgatcgattttcagtaatttgcgtaagacctcctctttcaagagggaatggttataatttttggtccgccgacctgtctgagggactcgacaacattcctgccttgctcgctcccccctccctccgccccttgcacgatctctcgctgacacctctcgcgttctgctccttttcaggctttctctgctcctcaacgctattctcacggtcgtcgcggttgactaccatgcatgtcttttcggcttcatctacgcgacatgttcgcgcgagcaagcgtgaacaggcagaggcagaatgccattctccctttcggctttcggtcggaagctaagatcatgtaaaagtcttgcatacgtcatgcccgcttactctcagctgtcccgcctctgcgtagaagcctgcgccgcaatgtttccgcccttgctgccggcgccggcgcccggcccgccccagcaaaatagctcctgctcctcgctcaggttgccgctcgtcccgaacgcgggctcggccggcggtgccgttgccgggtcggagatgtcgagagtctggagcgtcttaacgtagtttgctggcgggcgggcaaggagagcagcgtcagagaagcgtccggaaggaagaggggcggttaagagggagaggctcaccatgcgagtcgccgactggtgacagaggcgcaagccgatggatcagcatggaagcgtgaagcaagagaagcgagagcacgcactggcaaagacctggccgatccgctgcatagccagaacaagcacctcaacctcgaccagcgcgctcgtcgacgctgaaaatcaaaaaagggcggaaggatgagcgactgcactcgacagcagggtccagaagggcgacgggaaacgtaccctcggcgttgccgacccgcttctggcgcttgccttcggcgaggagcgtgttcgacgcaaagcgccagcagcagacgagaaatatgtcgagcttggcgactgtgacggcagacggcgatgcacgcgaaaaaggggagaggggtgtcagaagatatagcaaggccagggactcgtcacggggggctcacagtcgacgttagcaatcagctggatgagctgaacgaccgactttgcagcggctaccgtcttgtcccagagcgaggggtcgtagcgggctgcgatgggaagacaagggcaacaagtcagcttcagactgaggccggggctttgcagcggcgactgggttcgagaagcaccctgctcctcgtacgtgagcagaagcgagacaaagatctgggtgtctggagggcgagagggcatcagcggtcagtgatacgaacgacgccgggtcctcacgccggacgcacgaaggaggatgacgaccgggttgacgccgacgcgctcgccagccagatccggccgctcgacctcccagtcgccgaggtcgtgcggaccgttggtctcctggtcccaaggtgggatcccgcccggcacacgccggccagggtcgcggtaggcgagcgggatcgtcgcgatgaactgcttgagacgcgtctcgagctcgatgcactcgggagggatcgaacgcgtcggaggcagcggcagtgggggcggtggcggggctttgtcaatgctgctggctttgctcgagccggacgaggtgcgtcgcaggagggcagcgtcttgcactgctggcgaggccgaagatgccgtctgctggggcgaagcgccgccggggtcggacccggtgtagggcgctggctggacggcgtcgtcttcggcctcgagcggccggtcgaacagccgcgaagcctggtggagcaggagcatcgaggcagagatgcagccgctcagcgactgaggtcgacgctcgaccgactcgggcgttggaggctggaagaggccagcaatggtcgtgtcttccgtgccgtcgaagccctgagccagaaaggaggctttcttcagcagcagcggcgggaagaatttcagaggcggtgagcgcacctcagtgtactcgccgatcggccgcgggaagggcgtctcgatctcgtggtcggcgagggccgatggccagcagttggcggtcgagatgcacttgtcggcgataacggcgagccagaacgcccagatgcgttcgcctacgtcaatcatgtcggtcggcggcgggatcatcgagccgacccgccggcggaagccaccgccgcgctcttgcggccggcgatagtggtgggcgttcgtgtttgaggaggtggtgaggaacggcggccgaagccggtgcagctgagcaccgatcgcaagacgcattgagacctgagcgtgcggaacgacagtgtcagtcagtcttttgtaaagcaagaagaggaacgtcaaggacgaacgccgctctgtgtccaaccctccgggtagcgcccttgagagaagaagaagatggtgaggataaccgaggcctggatgatgttgatcatgccgagctcgtcctcgtcctggagacctttatcgatcagccggcggcactcgtgaaagagcgtcggctcgaggctccggaccgtcggatttggcgagaacttggccgcacacgtcagcatcgcaaagacgagcgacggatggggcgcaccctggctcggggcgaggtcgagccgggcaaagaagcgcgggtgcaggacgcagccgaactgccgacggcgcatccagaagaggcttaggagcgagtcgcggatgtcgcgcgggacctcgagccggccgccgggttgctggccgggcagggcggccgacgactcgaacgtgctgagaaagtctttcggcaacggctggaccggatcggaagagttgaagagcgagccgagcccttggggcggcgtcgagctgtcggtcggcgagacgtcggcgcggtaggggctcgaggcgaagccctgcttctgctgctgctgctgctgctgcgactgtggttgctgctgtggctgctgctgtggttgttgctgtggctgtggctgttgctgtgactgttgctgcggtagcgactcttgcgagtgctgctgcatcattggcggcgcgatgccaacttgcagcggcggcggcatgaggtggctcgtctgtggcgtgacgaacggtacaaactgggcgtaggcggcgtaggccgggtcctgccagtcgccgctcgggagcgactgcatcggcggcgtcggcaggtcggacaggcccgagaaggcactgagcccagcgtcgaggccgtcgaggccgagcgggaggggagccatcggcgacgactgaaggctggacggggccatcgtctgttgaggtacttgcagaggccggccgtaagcgaggttgtcggctaaagagaaggtgaagggctggtgctcgctgacgccgccgttggcgggtgggctgccaaagtaccagccgggcgtcgaaggaccagcgttgtgcggcccggccggctcggacgagaagagctcctcgagggcggtcgagaacgactgctgctcaagcacctgacggcgcgacggaggcttctcatgcgtcggctggaggtaggggtggaaggccgggcccgcggtcgacgaggacgacgccatgccgccgttcgacgacgacgacgatgacggtccgaccgagctgcggtcgttggtcgagaggacgtgcggtggtcggccggcgtacgacgtcgagttggtcggccgggcggccgacgactgaagggacccgccggttgaagcgccgccgagcatcgactcgaggctcgcaatcttggcctcgagtcgcataatcttggtcttgggcttggccacttcatcgaaggtgcattcgcggttcgtctgacaagcgggcgacgaggtcagtgggccggggttagggtgggtcgatactgcgctgcggcggcatgcaccttgagacagccctcgcacgaagagctgtcgggcatcttgccggagcatcgctgagggtcgacggatgaggagcgaacgtcagcagagggccctcaggctgtgcagctccagtcgggccaagctcgactgaccagctttcgtcgtctgcatgagggagggagcgcagccgagcgagcgttggacgtcagcgccgatcttgaaacgagctcctcctgatgaggccgacgcaccggcaatactggcatgccgagcctcgcttcagagggagaggcgtcgctgccgtcgtcatcttggtcggcccgccttggtcggaggaggtcgagctcgcgctctggggcggctgcagcatgctcgggtcgtccgtcgcggggggctgcggccggcggcagtgggccgagaggcacgtcagtcgaaggccgtgccagcaaccgtcaggcaagccgcacctgagtgttcgagtgcataaagggtgttgtgcagaagaaaagaagggacaggtcgcagttcgcggtcgttgcgaccttaagggttgccgaggcgaagcaggtcgtggcagtagttcggggtgcgttccgtcccgccgacgctgtcttgcttgcccctgacgcccttctccgcgtctgtcactctctcgcgtgcagcagcagcaaacaaccgagcgacaacccgatcccatcgagcggctgctgctgctggctgactggaaggagcggtgcagcatgtggcccttctgctctcgaccaatgcgatagacgagcttgtgtctcgccgacgagcccgtcgagcccgaaccctccaagccttcgcctgccgctcttgctccgcgctccctccgaacgacgaccgactgcaggaagcgccacaacggccacggcctccccgcaaaagaccacgcaccctgtctttctccccgctcaacgacgagccatgcgtgtgccgaggatcgtctacggcttgacgctctgccttcccgtgggtgttgactcgaggagcggaggagcgacggcacaccgagctgatcccgtcccttcctgcccttccccttttgctctctttgaccacacttctgttctatctttggccggacacccgttcgtccgtccgtctgcaggtcccagcactcgcctgggcctaccagacgtaccgcgcccagctgccgccagggcccggccagcagctcgcgctggcgcccaaggccaaggtcggcgtgctcgacgtcctgacggctgatcgccgggcgtcgatctggtacacctatgcgcgcgaggtgccgtcgctcgtacgtcccttctctgctagccgccgcttttccctttcatttgccctttatctcgaggcgcgagagtggcgtttcccgaccgacgtccgagcgtctcggaccagtctcgaagactgaccgacccgctcctaaccccccccttcccacccgttttccggcgatctcggcaatcgcggcgtagatggagcgtctcgcgagcgcggaccagctgtcgaccctcgttgtcccggtcgacagcgccgtcgtcgcccttccgtacaagccgtgcgtcccgccgccttggtcaccctcgatttcataccaatcacgcaccgcaccccccttgggcttctgctatcttggctcctctctgggtttcgccgcgccaccttagtttcgctgacgaccgttagtctgggacccgccgtccccacgtccatctcaaccccctcaggcaccaagcaccgtcgtccgttgacgccgcgcctctcggcgaagagggctcggcggtggagacgctcgctgcggaggagctccgggccgagtcgaacgcccagcgctgggtcgagggctacgtgattgctgtgcgtcgatgcgcttgccttccgggggcggtgcgctctgaacctgaccctcgccacctcgtctcacgcagggcgacgtcgcgctcgtcggcgctgcatcgcagacgtttcctaccctccaggccggccgctcgctcacctttacgctgccaacgacgcgcgaagcagccctcaagggctggaccgtcgccgcctcggatgcaaccgaggacgaggagaggccgcacgtcgttgccgtcctcgagggcgccaacggcaaggtcatgctcatcgaccggtgtgttgatatgtagggccctgcgaggaagagaatgcaacaggtgcgtgtctcccttcggcagcgcacgactctgagttgctgacgtctggcgcttttgttgctcggcaggccggactaaagagacgcctctgcagtcctcacgctcgtgcgactgctcgccgtcattgtcgagactcggcatctggcctcctcctcctccgaagcgcacttagggctgccttcggagccgacatgtcgctcgggagcgcgtgcgcatctatcatgaggagcgggttggtcggatccaactctcggctcttttgtagagaagccgagcctgcggcgagacgaaccaagggccgacgtcggccgtcgcctcgtgcatggccctgacctctggtcgaacctctctcatgatgtccatcccttgtacgagcgagcacgcaagctgtacgcgccgggacttgacgttccacgactgaccgcgacgtctgcggatggcccggccgtgcgatcgaacaaagtgcggatgcgagttacggagcggcattttgccgacgccgcgcggtgcccccttttcgctcgtcgcacaccgacgtcgatcttcgacgagctcgccagcaggacgacaggttccagtgtcgctgacacctgtgtcctcttgagggcgggctgaccatttcctgaaggaggacattcctcgaaagggctcagcgggccggcggaacgggtcgttcctcgacgcctccggacgagcccggcacgaactctgtcgtcgctccacgagccggcacaccagcggtactcatttccaagttcacgagttcagctcagctctagcaggccacgcggtcaatcagagtggaatcagaatgcgtcaccatggacggccttgcaattgaggaaaaaagttcgcggcaggggagcggctcagcgggggcggctcgatcgctgccaaagggggcttgaacttcgacttgaagtcgtgagctttctgcgaggaggttcgcggtccacgctccaagttcaccttgactttcgccggccgcagacggccgaggcgccggccgctcggcagcgggctcgaaaagagaattatattgcatgaactcgagcgtgcacctggaaatgaggcccgctacccccttcgccgcggaatgataagatcgagagctcaaagcacgccttccgacctagctcacgcctacagctcttgccggctgcctcaagagcagcgaggtcgctttcggaatggcctgaacgacccctcgaccccaactcgctcgtccttgccttcgcgccgcgcccggcccctcagcaatgtccgccgccgagatcaagcccgtcgacacgctcgagaaagagcagctcgcccaagccgatgatagctcctcctccaagggctcggacgagctcgagctcgagaatgccggccaggccgcgcctgtcaagcggtccttctttcgcgggaccgtcttccaaacggtcgtcatcggtctctgctccttcctctctccaggcctttggaatgccgtcaacaggtccgtcttctttgcatgcctcgagtttaccctgatgctcattggcttctctttgctcgagcagtactggcggtggcggcgcgcaggaaccgtgagtctcactcgacgcacccgcagtccgtcgccccgcgtaccgacatccacctctcatcctgcagttacctcgtcaacgccggcaatagtttagtctttggcgggatggtcggattctgttttattggcagcgccgtctttgacaagattggtgtcaagtgggcgctcgtagtcggctgcagtacgtcttccgctacctcttttgcttctcagcgagcggctctgaccgtttcccccatttctagtcggctacgtgccctactcgctggggctttacttgtgagtcccttcaacgtcgatctatctccggcttgctctcgctgatgctctctgcgttctcagcaacaagacccaaggcattgagtgggtcgtgctgttcggcgccgccctctgcggcatcagcgccggcatcttctgggcgactgagggcgctctcatcctcggatatccggaggctcggaagcgcggtgtggccctggccatctggcttggttttaagtcgggcggccagatcctcggcggcgccatcaatgtgggtcgcaccgccgacgcgcagcgcccgtcacgggctgacctcaaccgctcccctctcaccaggtcggcctcaacgtagccacaaagggcaccggcagcgtctcttcatcgacctacctcgtctttatcgccttgcagtgcctcgctcccttctgcgcgctcctgctgtcgcctgtgcgtggtcccgaaccgcgcccgttgccattgaagctctcgtcactgactcctcatggcgcacacagcccgagaaggtccagcgcgaggatggcaccaaggtcgtcgtcggcacgtccaagatcggcttttggcccgagctcaaggaggtttgtcaagtgctcaagcgcaaggaggtccttacgctgtgcgtcctgtcgcgcactctccttagcgtggagtctactgaccccatcagccttgcctcccctcacagcatgcccatcgcctttttcagcagtctgatgggtccttatacggcaacctacctcggcctacacttcagcgtccgtgcccgcgtgcttgcctcgctcgttacggcgatcctcaacgtcgggatcaacttcgcactcggcttcttcctcgactctgagcgcttccacctgaagacgcgcgcccgatgggcctttgcagtcatctcgctcctcggcctctgcacctggatctgggggctcgtcctccaggtcgagttcagctcgcaagccaagctcgtcaagtacgactgggtcgaccctggcttcgctcgggctgtgagtgccgcgacaacctttcgatcaagcgtcacccgctgatcccaacctaaacgccaacagtggacgctctacctcctctggacttgcgtgacggccaatcttcagtcatacctgtatttcgctatcggaggcatcagcagaaacccgctcgacattggccggctgtcgtcaatcctgcggtcgatcgagtcggccggttcggccgtcggctacggtctgactgcccgcaagacgctctcgcagctcgtccctctcggcatcgacgttggcttctttggcgtctcgacccttattggctggttttcgatccgcgaaattggctacacgatctcgggcggctacgacggcaaggtcgccggcgagccttcggtcgcttcgtcgacgaccgaggttgcgctcccgtcggtcaagcagacggcgctcgtcaagggcgaggcctcgcatggccctaagtaacagcacggacaaaaccccttagagctcctcctcctctgtacgactctctttccagccttcaccaggcagctgtacgatcaacacccccgcccggcctcaattcgcgtcagcgcacacaatgatgccctccttctcgcggctgagatcaaagagacgtgataagtaggagcagggagagtacagactgggagcaacgtctggtaaaggagaaaggatagtctagtgttggtgatacatctagcggcgcccgcgggccatcttgcggtcgcgctccgtctgggcggcccgcgagctgatgagcgtgtcgaccgccttcttgcgccacttcttcatgtcgtcgtccttcatgccgaccttgaggccgtcggtcgtcgcgagcaggacgtcgggcgagagcagctcgtcgtgcggcaggttgagaagaaaatgctcgacgagctgaggcgagttcagccgcgtgtcgtccatcaggcgcgacttggagacgacgaccatcgcaagcgcgacgcgcaggagaaaggtgatgcctgtgagagaagagtgaagagggaggctgagcgactggacgcggcagtagtcagccgaacagagcgtaccttcaaggaagaacatgtcccagacgcggaggacggtcgcgaacggcagcacgcgcacgaacattggcaggagccaccggccgagtatcttggtcatgtcgaccctgctttcaatctgcgatgccggaaacaagccagtcagccgtcgctcgtgaaggaggtgtctcagaagggacgtacgacaagccggcgcgcgaggaccttgtcggtcgcctcgagcaggtagacccagacgagcgagtcgatctggagcgccttgtcaaagtaacctttgagcttctcggatatggcggcgacgaggtagagcgcgtcctcgggcgccacctgcaatacgctgacgccggcaatcgggacgagagctgcgaaagcagatgctcgtcagcgcgatgcgagataaggctgcgaaggacttgatgcgacgtactcggctggtaaggcaagcggctgttaagttttgcgtagcagcgcgtaacgtcatgcaggtcgcgcagcccagagtttggctcgttgaagtgaaagtggtccgggaaggcgctgcagggtgaccgagtcagaaatcagcgttaaagcgtcgataagaaggagtcgcgagcgcaggcgacgcacgtctcgacgtcatcggtcatctcgtcggtcgcctcggcctctgcaagcagcttggtccaatggccggcttgtcgacgctcggtcgcgcccgagaagaacatccagacctcgccgcggatcgccggtggcaggccggcccgaaagattctgcgcgtcttcttgtccttcagcgccggcgctggggacgaagcggcaagcaaggtgcgctgaggggatgagtcatgttagcttaggtcgcaggatcgaatgccttggctcatagcgttactcacgagcttctgctcggccgcttgagcatcctctggtgacagaagcggcggcctcagcgagcgacgttgacccggcatcaggtggaagccaaagtcgtcaacttccggcggagggcccggcgcccggcgcgccctcagtggcgtaggcgcgctgacttcgcgcgtcaccgctgcgggtgccgctggcgaaggttgtgaacgaggaggcgggctcgcctgtgacggcgcttgcgttggtcgaggaggggggcttgcttggaacccttgactgggtcgcggtggcggacttgaccaaggcggcggctcgcgcggcgagactgctggcacaattctcagcgatcggggcgtcgtgagcgggctagactgcgaggactgcaacgatcgaataagtaagaaagtcagtgaagatcagaggtggccaaaaaggtcatctacgtacctcggatgcctgcacgtcctgcttcatgaggtcagcgaagtgccgctgggatgctggcacattgggcggcgtagcctcaggcgacgtgggcgagttcctggcgggtggagggcttcgcgggctcttaaggatgctcctcggcagtgcccggtcgccgcttgtagccatcgcggcaggtgacgtcgtctgctgagagggacgtcgggcaggagcggcgagctttgcttcttcacgttgcggcggacgagacgactggctgaccgatgtctgggcgggggcagacctcagggcctcgccatcctgaatcgccggtggcagagccgtgtttgctgactgcggcgtgcggacggcgggcgagttctggctcgagtcgaccgaggcggccgacaagggctgctcgggagccgggggcagcggtggctcgttcactcgcgtgtcgagggcggtgactgacggccgagagatggcctcgtgcaggttggtcgatgagactgacgacggtaccggtggctgctccggttgtcgcagagcggcacggtcgacaggcggacgggcgtccgacttggagcgtgctcgggcgaagaagcccatgagccctcgcctcggcccgctatcgtcctcagcttttgtcggcgaggtgacgggcgtcagcacttgagccgacggcagatcagccttggccgacacacttcgatccgtctggccccgaccgaacgccctcggaaaggcttgcagggcctcaaagcgcgagatgccggctgaccgagggctctccttctccccgctcgaagccgtcgtcggcggtgcgctgagcggtgacggccgatcgccggtccgtccttcgatcgtcggccgtcgttgcggcatgtctggaaaagtcacgttctcgccaatgccgagcgagatgagcgacggccgggcgttgatgccattgggcgacttcggcgagtttgagatggtggtgaaagacatcggcgagcccgaagcgtttctattcgacgagcgcaaacggtcagcggcgtcgcggcgcttctcagcgaacgcagttagacgcactcgtgatgaacggggaagccgatttcgaccgtctgtctgttgaacgactgcgaccgtggtctggagctgaagaaggccggcttcggcgctcgagacacggatccgctgggacgcagggctgaggaggccgtgttcgtgtgcaggttctccgcaaccgagaagacatcgaacgtcggggaccgcagactcttgggcgtcagtggtggtgaggcgaacgcgctccgactgtatgtggcctggctgtcgattggcaggcccgcagcggccgtgcgcggtgaaggcctagagttgctgcctgaccgactacgcgagccgccgttctgagcgacaggggcggctggcttcccggtcgcagagggaatctgccggccggtgtcgatcgtcaaggcgggcgtcgtgcgtccagagttggtcgagaaggacgggatattccgggcggttgccgcgacgcgccgcgcatccagctcatcctgcccgacgctcgaggcagtcgaggagccgagcacactggtcatgtcggggcggtcagtgtcagtggagcgctcgccggcgagcacaatcttgtcgtcatcgaatgtcgagtcgataggtgccgagtttgagctgtcggtgcgttcgaggatgcgtttgcggagatcgctcgccaggctgagtgggttcgacaacgacgatttctgagcgattggcgggctgatcgatggcaaggtcgctagcgggccgagcaacgtgtcgggcgagccgataggtgatcggaggccgagtagagtcgcaccgagcgaggcgtggacgctggctgacgcagccgactctatggaaagagaaggcgctgaagtcgggctgcccgtcccagagaacgacgctgcatccgcctgcggagccgtcggcgtcgtcggagagtcgtccgacgtctcgattgacgtctgggtcgaggccgagagcgagggcaccgtcggcagtggcggggcagcaaccgcactgacggcgccgaacgacatcatcgactgccgcttcttgcgctgttcgggccctggcctcaacctctgcggtgaggagacggtcgggcgcggccttgcgctgtcgccgacggacaggccaaattcggtcggcacgacgggcggtgatgccgttgacaacggcttgtcaaaccgctcatcctccgcgagctcctcggtccaatcatctggcggggcgtacatgctctcgcggccgtatgcgtcaaagatctccccaacctcggcctcgccacgaccgtcgctcgagatggtcgatgacgacaccgaaggcgagaatgtcggcgagtgggtccggaccgtctggatcggcggcaggccgagcgtagccagcgaggctgacgatgtcggcggaaagagtcgaaagctgcctcgtggcgaggatcctgctgatgaggatggcgtcgatttgcctgaagcccactgccggggcggcgacttggatggccaaggtggcacgcgcgaccgatcaggcgagccagggggcgacgacctgcgggttcgtcgctcgggcgagcgccgaccggccgtctgctcggttcgcgacgattgagccgacagagaggatgcctcagactcgcgccgataggaaggctccgggctagcgaagcccgagctgggagcggttgaggagccaggctcctcaagcgatcgtgggtctggctggcggccgttgaagttcctcgctgcactactgccgctcttggctgccttgctcgaaccatggccagggatggcagcagcgagtgcttggcgcaggtcttgctgagcgctgagcggcaaagaggccattgagtcggacggcgtcgttgaggaggaggacgaatcgaattcgaaggtcgagtcctccccaggcgttcgcgactgcacgtcgcgcgaggcggcgactaactggccctgcatctgacgacgggcgtccggcgagacgaggcggggcgtccgtagctcgcgctcgtctggcaggtcgaggatgacagtcgaccggtcggcatcctcgagctcgtcgagcccggtgccggcggctcgtcggcgggctctctcctcgtgtccggcgagggacggtaaaaatgagctttcgctgtcgtgcgtgaggtcggagacagagccgtgcgaggcgagcgagtagccggagagaaagctcgggggccgggctgggccacgacgcgagcggacggtcgcatcgaggtcggggaagtcgacgtgcgagagcttaaaacggccgacgacgccttcgcagaagccctggagaggaggcagagcagtgtcaacgaggaaagccggcggcgtgcccgctagcccggaggtcgactgacccaggtgccgtcgggcgcgttctcaagtagcataacgacgtcgcccttgagaaacatgaggctgtcgaccccggtggcgggaaagtccttgagcgccttaccggtcgcaagaccgcctgcaaacgtatgcgagcgagagaaagcacacgagtcagcgctcccgaaggttcgcaggtcgccgcccagggctgtgacgagcttcgaggccgacggaccctggtcgtgcaggcgatagagctcggcgacgcgtccggggtccatcgggggcgaccgtcggtcgggcatgtgcctctacgtgcgacgccgagcgggcgacctcggttgagtgtgtcgcttaggctctctgctagagccaactcccagagagctcggtggtcagagtccggggtcggccgtcgaggagggtgagggaaggaagggtcgggctgaggtcgacaggcaggcgttcgtcggcacacgaatcgaggacgagctcgttcgatcagagcaggtagggagtccgtcgactgccgtttcgtcggtccgtcgtcgtagtgggtcgtccttggtgcgctggtcggcgtcgctcgagctgctcgaggtcgtttggttcagctctcgcgcaggccgagttcggtcgcgtcctccctcgcgcgtcgtcttcgcgcctcagcggcgcaaaacggcccgagcgcgtcgcctcatttcgggtgccggccgaagctgaaatctgaaagaagccttcgcccacgatcactgagacttatcctctacacgtccatcgtgcgacgcagcaaacgacgggcctgtaggctgcaaaaagatcagttagaccgataccggggtcgaaccgatgatctcaagcggacagtgttggaaccgaaaacttgcgccataccactaggccaatcggccatcgatacaagaagtttcagtatttgtgtgtttatctcaatagaaagagggggccgtgcgcacgacttttttcttcattcacgaccaggcccactgatcgcacactgcattgcacctggtagaggtagagctgacctcacagagcccgaccaggacgtagcaggccgagcgaggctgatctcagagtcaccgcgcacctctgcctcctgtcgcactctcgccaagtgtccgtgcatagcgctacatccaatcacatccaatctagaggcagcatgcccgttgctttttctacagtctggtccagcagcctaaagcggctgggcgaggatcttctgctcgacgctgccgacgcagcggaggaacgagttccagaagccgtcggtctgcaatcaaggggtcagagcgctccgggggtcaggatgagctttgaatgataacgccgccaaggcccactcacgtcgagctccattagcgagtagcagttgccgcccttgccctccttgaggccgtcctcgaacgagagctcctgccactcggttcccttgaccggccgggtctcgccccggccctccgggccctcggtgacggcgccgacctcgagcgtcgcccacttgcccttgaagaactcggggttggcgagccacgagacacagagggcgtcgtgaatcggggggccgtccatgaagccaaagacctcgcggtacgtcttagcctgcggtcgcggggaggctgtcagaccactgctgacaaggagctcataattgactggagcgactcacgaagaaggtgacgagcgtgctcagcatccaccggacgtcgctcttgcccttggacttccaggcgtcgccgtcaaggccggtgccgtccgggtggaggagccgcttctggatcgcctcggtaaagatggcggtgtgcgtgatgttgagcggggcgaggacgacgggcgggaaggggaatggccgaaggatcgcctgaaggccggccgggtcggtgtggatatctgcgtatgggggccgagccgtcagctgtcatcctgaatcgaggtgagaaggcgcagacaaagaaaacgcactgaactcggccaccggcgtccactgcgggatgcctatcgcagagggtcagtgggcggtcgtcagctctgaccgtacgtctgctgctgcacgcgagatcgactgaccaaaagcgccgcccatgacgacccagccagcgaccgagtcccggacgaggtcctcctcctcggcgatcagggccgccgcgttcgtacacgggccggtaacgacgacccatgtcttctcgcccgtctcggccttggcttgcctgatggccttggccatggccgacgaggccgtgtttgatcccgaaggcgacttggagtagtggtgctggaccgtcgggttgtcgtgcgaagggaggagctcgacgccgtccatcctgaaggccgagagacgagggagctggtcagcttcacgtgcaggctgaaggagcttcaacagcaggaggcacgcacccgctcgcgccatggatcgtttcggccgcgccctcgtcgtactcgacagccccgctcggctggttcgcaccccggtgcagctcgatgtccttcggcgcgcggtacatcgtcaggagagcggctgcgcgggggagattcggggaagcgttgcgggtcagctcacgcagcagtttcgccagccttcagggccagcagtgtgcgcaccagcgttccgggtcgtgttttcgaggctgctgttgccgttgacggtcgagatgccgagcaggcggatctcgggcagctcgagggcgagcaggagagcgatcgcgtcgtcgtgccctggggtcgggggaggagaggttagccgcggtcgcctcactctccatcgcacgtctgaactctgccccttcccgaacgaatgcctgctgacagcagcctagcaggcctccaggtcgaggcagagtgtcaaggcctcggatcggaccgaagatggttccgaggcaaaaggcggactagggcgaggagctgggactcaccagggtcgcagtcgagccagacgttcttgaccatgattgcagagtggagtgaagtgaagaacaaggaggaggaggaggagtgcagggctgaggatgaggatgagagagagagtggtcgttgaaggtcaaggagagtcgggccggcttgcgtctgaagaagcgccgggcgagtggcggccgacgaccgagctcctccggccggccgcagtgaccagaggcacgggtcagccggtgcttcctaccgcggtcctgacaggcccattccatgcggggtagagccctcatagctcgagcaaccgacgccgttcgtcccacaacgtccggtccatcagcgatacgggagagggaggactgaggcggggtgtggagctgagctgctggctgcgaaacgctgcccgcgcgcagccggcccgagccaggacgtcctttgcacgcccacgggccaacgcccgatgctgaacagatgcgattctgcgagatctcatccggtctgtagagagcagcaaccgctggacttctgtgcaggtgggggtcgagagaggcagacaccaaccgggcgtctccactgctgctgcttgggctgagctcggcgacgctgccgctgccaacgacgcgccgggcgagcgacgagctgcaacgccgaccttgaacgcatcaacacacgcctcctcgcaacgattgcctacatctagcattcctggccggagtcctatccagtcctcgtctaccttggcgtctgacgcacccgccatgtctcgcctgggcgcgaccggcggcggccagggccctgaggtcaccgttggcgcgcgcgtcgaggtcaccgccggggccggcatcgtccgctggatgggcgccaacccggcgttcgcagcaggcaagtgggtcggtgtcgagctgtacgtctgctccagtcaggtgctggtcggctgccagcgaatgaaagagccgcttttgaggtgacctgatcgacgagttgacacgcatccggcgctcgtcccctttcgccttgtcgcagcaccaaggccgacggcaagaacgatggcagcgtcaagggcgaacgctactttacgtgcgagcccctgcacggcgtctttgtccggccgagccaagtgactgtcatcaagccggtgagatctctgtcctagaagggagctgctgaatgcaggggcggcctctaacgcgatctcgcacctgtctaccctagtcgcgcccttcgtcagccgcctcctcacacgctggcagccaggctatccggccaacgtcctcggcaaggctctcaacctcctcctcaactagccgcctcgccgactttgcgccgccgacgccgaccgccgccccggcccgaccgtcgctcgctgctcgcggcccgcccgcctcgagtagcgtagtgacaccccgcgccgctccgccaatgtcgaggaacgcgtcggcatcgtcctcggcgacgagcggcgtgcatgcaacgactatgacgggagcgcgtctggccgccgctcgtcttgcagcagctactcggcgagcacaggtcgaagggaccccgagcggcccacgtacggccggcccgtctcgtgtcagctcgccgaccaagccttcgtggtccatattgacttcgcaggagacagcctccctgccgcctttgccaccggccagaccgctttcggcaccgactccggtctcgcctccagctgtagcgacccagctgtcgcctgcgccggccttcttgcgcgctcctgtgccctcgggctcgccgaccaagctgccgtcaccgctccctcctccagcgatggacccaccaccgtcacggagggatcatgcgatggaggagctccggatccggatccgcgtgatcgacggcaagcgggccgacgagctcgagcggatgcgcgcgctcgaggctcaggtgcgcgaggccgaggacattaaacgcgagcacagcgtcctgcagagtacgtgtctgcgagattttggctgcggcaggtcgttccatcgtgctgactgctcctccctccggcctgtcgcatcgcagaaacccaccagaagacaaagggcgacctgtcgcacgagcgtctcatcgcgaagcagctcgagacggacaacaagttgctcgaggacaagcttgaggaattctcgacccagctcgagtcggtgaccctcgacaaggagctcttggaagaaacgctcgagaacctcaacgaagcctcgcggatgaatgtcggcaagcttacggatgagaacctcgcgctcaagacgatcaacgcagagtatgagaagccgccggaagaaggcggcgagcggtcagacgtcacgttcatcaggctcgagaatgaggtcctccggctccaggactccattttcgcgtgcgtcgtctcctgcctcgccgcacgaccgaagctgcatcacgcgactgactttcgatgaccacacaggctccgcacgctgaaggttgagggcgagcaggagctcaaggcgcagatctccgccctcaagaaggaccttgctgggacgttgactcttcagggtgcgccgcttctcaacccctctcctctagggacagcgcccgctaacaggtgaccttacgttcattcagccgactttgattccctgaagaatcggctcgacagcaccgagatcctggttgaggatctcaagatccagctcgacgacgcgcaaggagccgaagacatgctcgagctcctgaccgagaggaatctggccatgggcgaggtcggtctttgcctggcgatcgcgcacatcgttctgcaacgctgctgactgctggacgtctgccccgccgacagagactcgaagagcagcggatcgccatcgaggagctcgaggcgctgcgagagctcaatgatgagctcgaggagaaccacgtcgagaccgagaagcagctgcaggaggaaattggtgcgtgaaccgcgcgcgaaggtctgcgtcatccgagccgtctgccgactcgatttttcactccgcagactactacgagaaccagttccgggacgagtgtgaccggaacgttgacctcgaggaagctctgctcgatgcgcagagcacgattggccagtttcgagatctcgtcctcagcatgcagacgtgcgtctcgcctgtttatgcttcccgtgatcagccctcactgacgatatttcttgccctgggtcacagcgagatggactcgcttcgccagctccacgagtcgcagatcaccgagacggccgcgctctcaatccagtcgcagacggtcatcaacatgaacctccggctccagtcttcggcaaccaaggcgcaggccaaggcgatcgacatggagctgcagaagctcgacgcgactcaggcactcgagcacctcgcgatcgtccgcgtgcgtagccatcagcccgctgaacctcgtgagaccgaactctgctgacttgcctacctctccacagacttacctcccccaggtgttcttcgagctcgacgccgacgccgcccactgcgttctcttctttgaccggctcgcccagaagactgcgctcatcaacacggtcgtcggccaggcggctggcctgcccgaggcacttcacacggcagcctccgagactctcgctggcacgtgcgaggtgcgcttgtcgccttggcttgcaacttcaactccgcgactgacttgctccctgccactctccctgccaacagatgcgcggccaggtctcgcgcctctcaatgttcagccggcgctttgccgccttcctacggggctgcccgcccgagacctacacaaagacggcgagcatctaccacgagctctcgtcggtcgagaagcgcatcgactggcacatctctctcctgcgaaccgacgagttcaaggagaaggagtgcatcggcgacgttgaccggtgcgtgcgactcaggcgacccctgcctgctgcttgcactgcagctgacccccttcgctcctcgctccagctttatcgcgcagtacgagcacctcgccaccacttacttcttagagtcgatcgccgaccttggcgtccgccagctcgatctcgttctcggtttcgactatgatctcgacagctttgccgccgccgtcggcttcgcccggcaggtcatcgttgctgcttcgctcgaccccgaggtcgtcgtcgtcgagacggccggcctcacgctcgaagcggccatctatgcgccgatccagcacctgctcgaccttgtcaagtcggtcaagctggcctcgcgcaagattgtccggagggtcgaggacctcgtcgcctcgtcagcggcgctcaagaccgagctgctcgagccgctccgggccctcgaggagcatgtcgccaatgccgtcaactttgccatccaggtctgtcagcttctgttgacgcctccttgcgctcacagctgacccgccctctcgttcactacacagctcgccaagcgcatcggcggatacgtcggcgagattcgatcggccaaagagcctctccagctgcggaccgtcctcggcttcctgcgcgagatcacactcgaggtgactggcgaaggcgagcacgagccgtgggacgtcgtcgctggcttcattgcccggcttggccaggaggcagccaccctgctggcgacgctcatggaccaggatcaggtcgagaagggtatgttcttgccagatcgcgacgcaggcgtgaaacctcaagctgactcgagtcgatcgcaacacgcttgcagtcgtgatcgcagcgccttggacggcacgggccgaagagattgctgcggccgctcgcgtcaacgccgaggctgagcaacagctcgtccggctgacggccgaaatccgcgatctatcactcgaggtcaagaagcgggtgcgtcgagactcgtgccctgtcgagcctgacacgccgaccgctgatcctcgcttgctgctaccctcaggaccattcttcgcaagaggcggctgtccgaatccagctgcttgagcgccgagtcgaggcggcgaagcagcaggtgcgtccctctttgactttttgtcctctgcccgggtgctttagtttgacgaccgactctctttcgacccttctcaggccgaagcgatccgagagctcgagagcgaagtagcacggtccaaacggcaggagcgcacgctcgaggacaacctcgagctcgtcaaggccgagctggacgtctcgcagcggacgaccgccaagctcgagcagcaagtcgcgagctcgcccgaccctgccaagaagcgcgccggagaattcgccctggacggcagcagcacaatcgcaagaggcagcccgatcgagacggaccagttgctcagccagctcgaggcgctccggggggcggtcgacttcctccaaagggagaatgcgcacctcaagtcggccgacctgctcaaggccctgccgacgctccctcgtcgacggacgtacctccacccgctaccctcactcattccggcaagtccagcttctgacgacgatgacgaagtcggcccgtcgacgcccggccgcgagactgccgctaacggcgaggacgacgacgtccaccgtctcgagtgcgaagcgaccctccttttccgcgaagtcggccgcttctcggcctcgccgaaggtcgtcgacctgacggcctttggtccgccctcgccttcatcgacgaaattgcggtggctgccgcggtccaagcggccggacgcggtgctcgaggcacggaagaaggagggcgagaggctcgaggggagggtcgaggtactcaaggagcgggcggcgcaggcctgggccgcccaggcgaggcaccgctatggcttctgacgttctggtttcttcttgctcttgcccttgtcgactttacgatatctcatgatccacgaagcacggaagtcaggccaggtcaggcctgatgcaccggcggggcaagactcacgcacgccgccgacttgcggatgcgacttgagaaattccagcccgagcgcgcgcagtgagctcctcagccccgactcgcccttgctcctgcaaccgctaacgccgcttcgactcctctacagccctccgaagctacgaaatctggctttgctccagctcccagccactcgcctgctcgctctcctgcctgcttgaaccgccgccgctgccgctccttcgcatgccggcaccgacgcccgccgcgccgcccgcgcctacctcgacctctggcctcctccgcttcgctggccacaagtacctccggcagcggctcgtgctctcgctcctctcgggcaggccgatacgggtcgacgggatccgatccgacgatgtctcgcctggtctgcgaggtaagtcgctctcgcggcacaggcaggcgagcgagtgagccgagagctgaatctgctcgttgcctcgttgacagactatgagatcagctttctccgcctgctgagcaagatgacgaacggcacccacctcgagatctcgtacaccggaacgtcgctcctgttccggccaggaatcctcctcggtggcatccacacgcacgacgttccgctcacgcgctccgtcggctggttcctcgagccgctctcgcagctcgccccttggggcaagaaggacctccagctcacgcttaagggaatcacgactggtggccagtcgctcggggtcgacctcatccggacgttcctcctcccgaccatccagcttttcggcgcgttcgacgggctcgagctcaagatcacgaagcgcggcgccgagcctggcggcggcggcgaggtctacttccggtgcccggccgtccgctcggtcaagacgctcaacttcgtcgacccgggtcgcgtcaagcggatacgtggtgttgcgtgcgtcctaagcttgcgcgagcggcgcctcgagccctccagtcgctgacctcggcttatgcccgccgctagccactcggtccgcgtctcgccccagttctcgaaccggctggtcgagtcgtcgcggtcgctcctcaacccgctgatacccgacatctacatttactcggacccttacaagtctgccgagtcgggtctctcgcccggctacggcctctcgctcctctcgatcagcacgacgggcgcgatgcaggcctttgagcttggctatcggaaggccgacctcgagacgcctgaggaggtcgggagggcctgcgcggccggcctgcttgaggaggtccgcaagggagggtgtgtcggcgagtgggcgcagggctgggttctgacggccatggtcctcgggagcgaagacgttggccgcgtccgtctcggcgagctgactgcgacgtcgtgcgtcgtacttcttctaggatcggacatgtgcgcatctgctgaccccttcctgcttcactgtcccggtctttgtcagggtccagcttctgcgcgacatccggtccttcttcacaacgaccttcaagattctgcttgtcccctcgtcgacgacagcaccgacgagcgacgacgacggctcggacgacgagatgacaccggcctttgagaaggggcgcgagtacatcttctcctgcatgggcaccggctacaccaacaccaacaagagcgtgacgtagcggttcataccagaaggggaggaggatgcgacatgcgacttcctttctacagactggcgagagaggtcgggttgaatcgggtgggtcacctgtcagcatcgatctcgaagcatacgatgcaaggtggcccatgtcggctgaggtgtgccgtcgacggctagttggacaggttgcgggctgaggaagccttgacgtcagctcaccgccggctcataatgacgcttgatcgcaagcgccgtctcggtgagcccagtggaaaggctcgaggacggcgatcgtgttaggtcaagggtacgggctgagaaacggcgcaacaattggcctcgcatcatgacagctacgaagggaggacacctcgagatggatgcagcgagcaacgataggtgctagtcatcctggtcagccattgatgctcaaggcaccgaccaacactgcccaccgagcctgatagatcccccttaagatcccgcttaagcgcctaatgaaagatctcgtttcttcatctatcggctgcctacgggctcggcgacggcatgaagctgctgccgacgcctgcctggtacgccgcctgaccctcggtcgagcgctcaacggccgtcttcccccgtgccggcttctcccagattgacctcgccgccgggttcgcggccgcaaccgattggcgctcggcccgcgccttgaggatgtctggctcagtgacgagcccgagtttcgccctccgtccatcggacgatccgggtcggttggagtcgaccgtccggggcaagacgtgcgtctcgtcaaagtgctcctgggcgagctgcttccggttgtacagcggctcctcgaggtagccgccgatcgcggccggctgcttgggcttgtcggccgagtgcgtgatggcttcgctctcgccgatcggaggcgcaacctcctggtagagccgctcaagcgcccagttgggccgctcgagcatcggccgatcggcaaatgtctggaccgagaggacaaccttctcggcctcctcgaaccagaccgctttgagcgaggcgacggcggcctgatggacaagagcagaatgtgaacggctcagcaactgtcaaagacgaaggaagggaagcaatgggaccgaccgaacgctgagcctcgagaatgcgcgagccggaaccctcgccgagcttgatgtcgcccgagtaaatgccgacaacgtaggtaggggtcgccgagagccgaccgctctcgacgagcagccgcggcacaggccgctcgaggccgtagcggacgaccgtctcgcggagcgactgaagcgggtcgagcagcttgacgagggcgttgaggtcgagcgagcgcgaggcgaaatgccgcttgatgagcgcggtcgcagctgagagaccctggcgctcgtagacgaggccgatcagagcccggacggcctcgccgacggcgaggtacttgagctcgggcttctcggccgtcggctcctcctgttgccgagcaagacgaagaaagatagatcagcgcacgctcgggaagcagggaagcagcgcaaagcggacggacgttggacgcgagcctgcggtaccgaacgacagcgccagtcgcattctggtcctcctgaccaaagtcttggctcggcgcgacaaagccgatcgcgagctcgcgcccgacgtcgacgagcgcgccttggttggtgagggcggtgacggcgtagccgagcgacttggttggcaggttcgggaagcgcttcatgaggtactcggttaggacgaggtcggtgatggcccggccggtcgcggcaagcaggctattgtcctttggaaaggccggcgcaggctcacttgcctcgagcaagagggccgcagctctcggagcgagcggcgtcgtcgacgggataggctcggcgttggccggatcgctcgcggacgactcaaagaaggacgggtgggtgagcacctggaggatggccgcctcgaggtcgtcggcctcggcctcctgggcaagctcgacctggccggcgaccgagtggccgtcggtctcgaactcgccgtcgtacgcccttcgccggtggtcgagctttggctgctccttgtcggtcaggccggcacgagcggcgatcgtccagagcgtcgaccggtggaacggcagccgggccgcaaactcgccagcgtcgatccgcgagccctcgatccggccagacgccttgacctgcttcttcatcggagtccctggcgacctgggcttgacgagcttggccaaggcctcgtcggcaatctctggcagagggaccgaagggtagaggccagagagcgtcgccgccttgcctccgcgggcgacggcgaactttaccgggccggcgaagagcgttggcatgccgtccgagccgagggcgggcgactctggcttcgtcgcaggccggatccgaccgtcccgctcgatatggggaagaccagaggcctccgtctctgcccgggcactccgcttggcctcccacctagccgctttgatcgagttacgagggcctgacggcgtgaagtgggcgatcgaccggagcgccgacgaggaagctggcagagagcagggaagagggaggtagcgtcagtaagactgaggagctgtgcgatggcctgtgagcagcaaaggccagccgcatcccctctgcgcttcgacgcttatggcgaccatgtcgtccgacaggcactcgaaagaggagctgagctcgatgtcggactggcgagcaaggccaccgagctcgaatacctctcctgcgccgctccgacgagaccgcgagagacgagcacgtacctcggacgtcgcgcgaaaagagctgatggagcgccattcggcccaacggggtgtctgcggtcgctagacgcaggcgaggacggaaggagtgcgcgaagagctcagagaagcggctagtgacgcggcgagctgacggaggaccaagcgacggcggcggcggcgagcgtgctagacctggtggcgccgggaggagggctctgctggttcgaccgacgagctgggaggcgagacgagcttggaaagcggagtacagagcaagaacaagggcgagtcgtcgagtcgtctcctggcgcaccgtctccgcgcgcgcgcgcgcgccaaccgacgtttctgaaaggtgggccgccgcagtggttttcatcaacgctagcagccagcggggccggcgacgacgcgcagctggcctcgtgctcgggcgacagggacgagggccatctctcactctgtcctacctctcctcactcgctatcgtcgagcggccgcttctcacggggctcgcatatggactatcgcttgtcatcgcccgtcctgccgcaggaagaggggcgacatgcgacatgcatgcgtcagcggcgcaaggcacccttcatccctgtcggccggtcgatcacgcccggccgccgtcacgacgcgcctcctctctcgagggctcgagcccctgacggccccagctcggcgggcaaggcagaggaagaggagggcggctgacgctcgctgacgacgaccgacgaccgacgagcttttcctctctttcgagctcccttcagccttcctctctcgcagcacctcgcctcaccagcgactcggccctttcatccgctttcttcgacagcctcgtcagcaaaggtctgctcagcaagcgactcgcgcttcgagtcagctcgagccagacctcccgctgccgccgaccggccacgccagcctcgccaggcgcctctcgctttggcgagctcgatgtcatcgtcttgcacgccgccggcgagctcctcctcagtagagcttgacagcaacagcgtctcgtcatcgtcggccaccgcacgtcgttccgcgagccgatcgctgtcgagcacaacaccgggtgagcctcttgcgcaggatacgccgcacctcaccgcaccgagctgaccggcgctcgttcggtagaccttcgccttgtccccacctcggttactcgctcgccgccttgctcgccccgccgaggtccccgcgtcaaaggcgcctataaacgcgcctccgtcgcctccgttctctctggcttctcgctcccggaggagactagcgaggacgagggcggacaggcaccagagcccgaagtcgagctgatgcggtcgaccgtcgtctttccgcgctttgctggttcgagcggcggggacgtcggcggttggcactcggctcctacgacgcggtcggcatcgccggagaagatgcagacagacgcgagtcggccagcgtctgccatctcggacgacaccaactcgaccgccgcagccgtctccaggccggcatcgaccgtctccctccctgtccacagcagcacgccgtcctcgcccctcgtcgttcgacgccggtcaaccgtccgctcgtcgacggctctgccgacacgctctcgggcggcagcaggactgggcgagcggacgctctcgagtccggcggtaccgtccctcttccttcggcaaggcgtggcgacagcgaccggtccgccggccaagcggccgtcatcactgacctacgatggcgagggcaagaagacgtccggtctcggtggtgccgacaacaccgagggcagccagcccggtatgaagggtcaccccgcgtcatcgtcatcgtcggtcgctggtcctgaacggccgacgcccgtcccaccgccagctccaattgaccctgcagccgagtccgacgacgccgcctcgcgccgccggcggctgaagcaggccgagaagaaccggagggttgttcgcgagctgatcgaaagcgagcggtcatatgtcgctggactcgaggtggtcgtcgatgtgcgtcgatcgagccgtctgccgtgcgctcagctgactgacgccgttcatccgtcctgcacctcatcgccgcccgttcagcacttcatgcggcctctcctaaaggcagcagacggtccaagcccgccgctcctcggcaagaaggcagtcggcgaactcttcggacccgtcctcgacatcgctgccttctctcgtgcattgctcgaggcactcgagcctctcgcatcgtcggagcccgccattgccgaagcaggcgacgaagcgccggtcgacgctgccagccagacgacctccgccgtcgagccccctcctcctccatcatcgaagatcgccctcgccctcggccggctcatgcctttcctctcgctctaccaccccttcatcgccaatttcccgcacgcctccgcccgcctcgccacccttcgcaaggacccggcctcgagctcttttgccgcttggctggcggagcgagaagggatggaagaggcgcggaggctgaggctgggcgactggctgctgacggttgtccaacgggtgccgcggtatctgctgctcgtcaaggtgcgtgcgcgctcctgtgcgcactcgcaagaacgtcagctgacggccctaagtgcgtgggcttctcgagcaggacctcgtctcgtgcacacctgaggacgactcggagtatgccgagcttcagcgcgtgctgacgctcgtcgagtctggtgcgtcttcactcgcctctgcagatcatactcaaactcgtcactgacaacgcctttgtctcgtcacccgttcctgcagtgacggaggcgctcaacggccggctgcacgacattgcggcgacgcaggagctcgtcagccttcatcgggcatttgctggcagtctcccacagaccttctcgcttgtcgtccccggccgtcggctgctcaagcaaggtgcgtcggcgagcgaagggtcttccctctcctcgttccggtcgaaaacaatggactcattcgaaccttgttgccgctctccaggcgtgctctcaaaagtcggctcgcgcaaggccgaggaccgtaccttctggctcttcaacgacctcttcatctacggaacgaccgcctcgccggctgcgacggcgccagcgacatcaacgaagacctcaggcgcaactcggccgccgctcaacgccacgcgctcggtcatctcctggattgggctgagtcctgctgaaggcggtagcagcagcgtcggcggcctgatgggaggcgtgctcgatctcccgcttggcgccagacgcagtcgctttgtctttcaccgagcgatccgcctcgaggaactgaccgttgtcggctcagctggcggcagaccgggcgaggaacgtcacgcgtttgagatcctcagcccggacaagagcttcgtgattgtggccggtgcgtccctgactcttcttcccgctagcaaaggcaagggacgtggcatccactgacgaagctctccctgtgtcccctttaaagagacgcgagagttgaagcacgcctggctgttggccatccgcgaggccaaaacgcgcctcctggccgacctgcggaccctcaacacaactgaggagcacacgatgcgccgccatcggaggcggtcgcttcaggccatgccgttcgcatcgacgttgacggcggtcgacccggcctggtccacgctccggcctctcgtgccaggcacgacgacggtcgcccgcccagcgtcactcgacgcttcctcgacggctgtccgagcacaggcgaccgtcgacgcgccgaacccgagcgacacggtcgagaccttcacggcggcggtctgggtgcccgacgcccaagctgagcgctgcatgcgctgccgcgaggccttcagcgtctggcgttggaggcaccactgccgcatgtgcggcgtcgtctgctgtcatgcgtgctcgtccaaggtgcgcttctactctcagtctccggccgtggcctttctcctttactgacgactcctcgtctgctggcttgcccgtgcatccaggccgtccagatcaacgactcggccgacgctgcttcggcgactcacggcgcccggacatgcgacgcatgctacgcggccctctttccgccatcgacggcgagcggccagtccggtgtgacgttgagccggccaaacagtgaccacagctcgtcgacggcgtcggacgagcgcttgccgacgcccggcgatagcctcgagcggctcaccgagggtctccaggactctgagcagggacgaggcgacgactctggactgccttcatctgtcaagatgagtgggacgagcaccatctcgctcctgccgcggaatcagcgagcgttcgccgttcggtcgcctgcgcttgggacgctcaagacctcggcttctcggtcggccgctctcttcccgttcccaacatcggccgactcggtcgacgacgcgacgctgagaccgagtcgtcgaccggcagtctcgcttggcacgctcaaggcctcgagatcgccctttgcagactcgtcctcgcctgccgccgccgcaaacgagtttggccgacagtcctcgcactcgccggacgcttggccagtcgcaccgcgtcggacgcgactcttgtcggcgacgaacgaccgcttctcggcctttgtcggcggcggcgtcggcggcgaggaatgggccggccgagccgagatggcgacgctggcgggcgagcgggtgcgacgagagagcggcgagcggtggggggacgcaagtctcaggagcggtgaagcgtccgaattgctccggcgcatgctaggctcgcgtactggctagccgcttgcacctctgccgatagacatgagaggatctgtcgccaggagtcgggagagggcagcgaggggggattggaaaggggtgcccctatttcatttcaggctccgatcgtcatcggcggccgcgagcgaatcgcgtgcgacgtcgccctgtcgctcgcttgctccctctcacccaccacctcgcccgcgaacctcactccggcttccctcaacagtctcgtcgacaacatgcaatggcctgctcaggtcgtcagtactcctgttcgccagccgtcgagcgagaaggctcgagctgacccaggcgcgctcgggcccctgtctcccgccctgcagtcacctttcgccgcccgcatcccgccagaactccagctgaaggtcaatggatccgtcgatgccctcttccggacgcctgggacggacatggacgtcgcgtggcgcacggtggcggcgatgagccgcgtctctcgtatctggcgggtgcgggctcgtcttcagccttccctctcggcaaggggcaatgctgacattcctcgcctatctttcctgcaggacgagacctatcggctcctctgtcgcgagatcccgcacaagcagctcggcatcaccctccggactgtgcttcggacgccagctttgtgctctctcgtccgcgatctttcgctcgacaacgacgacgactattttgaggacgacgacgacaatcagaaggatggcgacagcaacgaccgcttccaaaacatcgagcgcaaatgcaaagccttcctcgacaacgtccactggttccccaatctggaggaattcggccgtctttacgtccccaagtaatagaggcattggctgctggccgactgccctccaggcgctcgcccccgtccgcttcggctctcgatcttaagctccggtaatcatgaccctcagcgctggctcgacctctctcggctccaacacctcagcatcacggtccaagggccactagaggcagcctttttcgccgaagtgtcgtcgaatctggatcgactcgccctctgtgtcatgttcgattggacgctgaccggatatgagcgttctcgtacgccgcttcacctagctcacccaatttgccatctccacgtggcgttctgccccggacctcgcctgcgactcgctctcgctgttccctctcctggggcacctcgaaatacccccggacgccgtgaggcctgccctcgccgttccccatgctcggcttaagactctcacaatcggctacatggaagagatgctactctctgtcgacgaggtcgatcggtgcctcctcgagcgccggcgcctgttccccaacctgcgcaccatccgacttccgcccgacgacttgacctcgcctgacgacctgcagccgctcatcagcaactgcaggcgaccggactccgcgtcgagcgatactagaaggggttcggcgggtaggaacgctggcggagggacagtaggtgcgatgcccatgagcgtcccgacgtgcgcggctcggacgagacggtgcaggaggcctcaagctgtcctcgcgcatccctcccctcttgacggccgtctcagcctgttgtctttgtgaaatgggcatgggactgaggatcccagacgttttgagggaagagagagtacagcgcgtagcggagaaaagagagaatgagagggcccatgtaagagtgtggaagggaggggagaagggtgggggtgggggtatgcatgcgaaggagcgagcgacgagggaaggagcgaaggcgaaggaagaaaaggacgacgtggccgagacatagaggggcgagagaggcgcctgttttgtctttaacggaagtcggtctttccggccttgcgcttgccggcaaggagccacttgggccgggtgacgccaatgtgcctgtcggcctcggacgcctttcccttgtagttgcgcggccgctgggcaaagttgcggagctcgttcgacttatcgtactgggcctttgtgaggccggccgtcgaccggtccgtcttgggcgcccgcatgtgggccgcgccgaccgcaccgccacgctgctcgtcctcgccgtcgacagacatgtcgtcgtcgtcttgctcggccgcctccatcgccagctgggcctcggcttccatccggctccgcttcgagcgcttgccctgccgctctcccggaatcgcatcgccctttgcccggacgccatcgacgatgccgagcccctgggccttggccagctgctttgcgcgctcctcgatccgcgacgggtcgagcccgaccgagcggagcgtcgtcgacagctgcgagagcgtccgcgtctggtgcttgcgcgggatgattggccggttggcgagcttgttgcggtcctgcgaaaccttcttcatcgacgccttcttctcgcggatcgcgtcggccgtcgcccggaactcctcctcgtccgagtcgatctgcaagggggaggtgggggtggagtcagcgaggtagcccctagtctgatgtgagaaggctgggggcggggcgacgcacaatctcctcgtcgtccgacttgtagaagccctcggcctcgagccgctcctcctcgcgctcgagcgcctcgagcttctcagcaatgtccgggtcgatgaagtcggcaacgttcttgccgtcgagaatctcgggcatgacgtcggtcttccagtcgtcgtcggcgagcaggtagttctctgcggacggaaggggggaggatcagaaactgcgaaaaggcgacgccggctggagccacgcactgtagtggggcagggtgtagacgcccggcccgcccgactcaagctcgatgtcgcgctcgagccggatccggtccgggtcctcgcggtcgtacttcttgcggttaaggaccgcctcggggatgacggccgcccggacgacgtcgtcgcgctttttgggctcggcgacgaaaatcttgttggcgaccgaattgatgcgcgtgcccttgagcttggcctcgacccggtgggcgaggagcgcgtcgcatgcggcgttgcgaacgtcgatgacgccctcttcagagtagcacgacgactggacgacggtgacgtcgcccatggcgaggatctcgtcgatgagcgcccgcgaggacgggtcgaggtcctcgagccgcttgatgtcaatcttgttgatgacgaggagcgtcggcttgttggtgaagagcggcttgatcgagtggaagagcttgcactgcggagggtcgatcgagggaagggtcagcgagagctgtcgcggggaagaggagaggaagcaccccacacagcacatcatgtcaacccccctcgccccttgcccgctcgccaccttcaccgaagcctgcgaatggacggtcaagattcagctcgccagcaacggcatcccggtcgtctcggtcttgctcggcaccgagcggatcctcgaccgcttcgtagatgtcaacgccgagtacagttggaaggaccgcagctaccctgctgcctcttcggtcgcccggagcgctgacgaggccaaggcgatcgagcgcatctccgacaagctcgcctccaggtacggccctgccctcgaactggctcaaccgaccgctagaggctgatctatgtgcgcgctctatagcgccgagcgcttcttcccgcgcgcctcgaccgcggactacgagacggcgctcgacaagggcgtcgctagctacttcaagctgcacttcgagaaggccaagaccgacgagacgatggagcaggcttggtccgactggtacgccatctctttggccgagatctggtctcgcacgatggcgttcgctgccgctcgccacgatgccacgctcgctgctgccgccgaggcggagcaggtcgaggcggtgagcccggcgtcgccctctgtcgagtcgtcaccttcccctttcccttccgtttcctcttccatcccgtccgtggctacctctccccctgtcacgacgcccgtcctccttgctcccgtctcgcccaagtcaccgttcgtcccttctccttcccgtatccctcgcctcgtctcgtccccttcccgttcgtcttcccctcgctccaccgcctcgtcgccttcccctcgttccgtctcgtccgcttccactcttcccttcagtccgactcgttccgtcatacccggccggagtcctgcgccgccagtccctgaagcactacccggtcccgcccgccactatggcgaagcggcttccacccttcttgtctccggtccctcagcggccggcgggctcccggctccctgtagcccagatcaagcctcggcggtccggccttcaaaccggcccaggtacgtctcgtcctcactctgcctctgtctgcctcactctgctcacgctcgctctccttctcgacctgtagacctcgacctcaccatcagtccaacacccagcgccgccccgaacgctctttcttcgacagctcaaggtcagtgtctccctctcttacgtgccggtcacgtcgccttgctgaccgtgtctatcgccccatcccccccacgtctcgctgaccctcaagcccttggtcgacaccctcaagcaccctcaagcagccttcaagccctcaagcctcaggtatgcccgagtgctcacttttctgcccctcactcgcatcactcggctgactcgattgtgtatgcgctgtctcgtcccgcagcccgcagccgtcaatctcgacccttcccttcgagcagcctcaagatgtcgagcgagccctttttcgacagcttcgtgcgtctttgctctcgctcgccttcacctctccgttccgacgctgacctcgttgctcgctcgctcgctcgctcgcctgttccggcccctgggtcgccggaagtcctcgagagggctcgccctcgccctgctcgcctcgggcgacctggtccgttggactgggcgatcgggcgagttgggtcctggcctgcctcctcttcgttcgtcggtgaaggacggcggccgattcggaaggctgcgccgagcgacacggcgaaggacgacgatggccagcgcgcttgcgagaaaaggaaagggctacgtgagatctgaatggcgtcattctgctggtcacacttgccctccgacactatgcttcgttgcaacgctcgccgcttgctgccctattgaatcgaggccgaccgccgccgctactcgacgctcatgtcgtcctggcggtcgccatcccatctgcgcgcagcggcgcacgggagccaatgcgtacgatagccggcagccagggtgcactggcacgggtcgaaagcagctcgccccctttcagcaatggcccctcctgagcatcgtgcccgccgtacccaaatgcaatcggtgcgtcagatggtcatccaattaaggactgggtgcagagtggcgagaggggctacagcgggctgacgagtacaagtgagggggcaaagggagaggatggcgaaagatggggatcagggccgtcatagcgggcaggcggcagggtcgggtcgggcgaaggtatcggacaggtaacgccagccaagttgagaggtgagcaagctcgctctagaagacgtggtcgagcccgtccgggtcgcgcggcttgcggttgccgccgcccgactgcgagttgcggctcgttgagcccgtgctggcagacgtgttgcttcgcttcggctagagggcgggcagcgagaaaaggccaggaacgtcagcaacagaaagctctgattgccagataagaaagcgagcgcggtcaggacgcactgctccgtagtcgcggccccactcgggcacgtcgtcgtcgttgtacgccgtcggcacagccttcttcttgctctttttcgacggcgccgcaacgtcgtgtgcggccctcgtccggtcccagcggtctccgtcgtggtcagctgcaggccgtgagccggctcccgcgccctcaaagttggcagggtagtgccagtgctgctgattcggtgcggctggcgagcgggcagagatagggtcagccgccgctggagcgcagggtataagtgagggaacgcacgacggtcctcattgtagtactcttcgtcgtcctcgcgccaaagtcgctcgggctgccggccggcgcccgacgtgtcggtcgggttggcaatgacgtcggcaatctggtcttcggcatagtcctgaccctcaagagtcgagtgcggcagccgctcctcgtagctgtgagtggggccaaaacgcaccagatcagcatcgatccgtcaggcagcaggcaggcagcaacaggggcggcaggcgagggcgggacgcaccggccggaccactggttcttggccttgcgccggttctcctcggtctcgtcgatgaagccggctttacgcgcccattttggcgtccgcttcttgttggcgttgttgcggatgttctgaacgtagctgctcggagaagaagcggtgaacggaggcgattgcagaggaggaggggtggggatcagaacctcgggccaaccagcggcgtttcatgaagttcgaccgagacgcacaagttatggccatggcccgggaagtctgcaagtacaggcaagggaggggcacaggcgaagtcgagaatcagctcaggagcttcggggcatgcgctcggccgaggtcgacacgaggcgccgcgcgcgggcgatggccgagcgggaagggtcagacgtacagcccatgatggtgaggatgacgttgataaagaagtcggtgccgatgccgaagcggacggcgacggctgtgagcaggaaggcatcgtcgtcagtctcgacacgtcgaggcaaggagcgaggggaggcgggcgaggccgggctgacccagcggcgggacgaagaagccgaggatgatgatgacgccggtcatcgcatgatgcttctgcggcttgaaggcctccttcttgggcaggtagtggttgtacttgccggcgctcatcgtgggcgagctggggctgggaggttcaggtggagaaagatgggtcgggaaggtggtcgtcggcagtgcgtcgtgagctcaccagcgccgcctcctctcgcacccgcgcgttggccgcccaagcatgatcggaaggcgcagtcgtttcgtcagctgttcctatcgaggtgagctcagacacctgcgagcaagcgtcagccgccaggatttggccgcgacgctgtgctgtccggccaacagcctcttgtttcgtacgacgacgacgaagccggggtaacctgaccagactgcgctgcagcacctctcgttcgcttaacgacgcccggcgcggagagtccgcccaggcttgcgcacgacctcttcagctcatacaatcgtcgaacctcgagctgctgaaggcctgcaaccgtgatgcgatgccgcgcatgccgccttgtacgagatgggcgcctcaacggggagctgtcgtcgtcctccctctcgcgccgatccgtcatgcccgccaagccggcagattgcaggcgcagtttcgtcctgagtcgccgctcatcctttcgtcaagagggggcgcgatgaagacgacggcagacaaaggccgcaacagacggcaggaaggacgagcaaggaaggctgaccggcaggccgacggacgacgactcagcagcggcggcagcagtggccgaagagcatccagcccggctcgaaaagaactgactcgaaggcggaaggaccgggctcgaccgtccggcttcgcgtcggagcacgcggccggcctcgttccggccgtcgctcaacaggggtgttccgccgaaaactgtgaagaggaaggcgagaggggccgagggctgaccatttgagctgacctttcgctatacgacaacgtcgacggtcgccagctcgctcgtcctgccggcggctgctcaggcactcgccgtcgccgtcagcagcgacacccgccaaaggaaaggacggcagtcgtcagaggcgggcaaggtcatcgaacagcaatcgaccaagcatcccctcctgtcaggctcggtggcgtcaagtatagaggcaggaacggcctgccggcttgtcagccgcctgcttgaatactggcgggcggccgtccttccctccgccccctcctgtctttcccacctgcagtcgtggacagaacgtcttgattgcctcgtggcccttcacagcctaggtcgatcgtccagtctgccctctctctggcgcccttcacacggccctcatggagcaggtcagcggcggcggcagccaaggtttcgccgcagatgagagccggccggcgcttgcagactgcagtctgctgcaaggcgggtccaagcacgcgccagcaggttgacagttcggccgcggcggcgcggcgcggcaaccgacgcgacgcggagcagccttccagcgaccgttcgcttctccttcgcccttgacgaccacccttgctggccgacctctctccaggtcctcctcgtcgtcctctaccctcaccctcctacccttctccgatgcctcccatttccaagcccaagccgcctccagcggcgtcgtcgacgactagatcctcgccgccgcctccgcctccgccgtcgaccgcaagcactgacgcgaccgagcgagccttctttgcccggcggtcccgcgtcctccgcgtcagcggccttcagcccgaccaggccaaccagcaggacctccgaacgtggttcacaggccggctcgggctcggaccggacgagacggtcggcatcgtcggcgtctgcacgcacctcccgccgcgcagcagcagcagcagcgttggcggcgacactgaccctgtcgctctcggtagcagcggtcctagcccggtcgattggtgggccatcttcaaggaacacgagctggtatgtcctctgtcctggtttgttcgcgcctcgttttgttctggcagctgacctctcgtctgccctggctcttgaaggctcgcgacgcccatcgcaaggtcaatgcgtcgttgccgaccagcccggcagaggccgtaaccgtcggtctcgcgctcgaggaggaactcgcgccactcgaccggctcgtgccgatgccgctcgttcgcacgctccggctcgagcgccaggtacggctctgcccttgaattggcagagtcggccgccagatgctgacctacgcacgcgcctcttctctcgtctcgccttccttcaccgcagcagagcttcccatcggcatctggccctctctcacccgacgatgaccaccgagcttccttgcgggcgacccacgcccggacgccgtcgctctccttctcgtcgacgtcctccgctttctcgacccacgcccaaggctcgcccgcgtcgcagacggcgcccgacctcggcccgagctcggcccgcacacggacttcttcgacgctctcgctcaagacgcagtttgacgtcggggccaagccgttctacccggccgatcgctcgccctcgacctcgttcgccagcggcggtgcggacgagggcgccgaccgagacgacatccatcgccggcctagcctccagggcacttacggtctcggctactcgatgactggcgagacgggacacggcctgtacgagggcgtcagcgactttgagctctcaaacctcggcctgctcgggaccggtggaggagcgagcgtcgtgcgtgttttctccctgctccctcgttggccgagccttcactaaccgaccgtctcgtcccacccaactgcagtccttccgccagggcgactggatcgtgcgtgcctttccgtctgtctcgctcgggatgtgtcgtatgctgacttccactccacgcttgcgtctgcagtgcccttccgacacctgctgtgcgtctgacactcaacgccgccagcgccgcttttcaaaactgacgcttgctttgcccgctcgcgcctccccttagcgttccacaacttttcgcgcaacgagcagtgcatggtctgtgcgacggccaagcctcagtcgtcgtcgtcacgacccgtcccgcgggccgagctctcgacgccgacgcagcagcggcttacctcgacctccaccgccggcaactccaactcaacctcggccgaagccgccggaccggcctcgcacctcacccctcagcagcagcaggcgatccagacgctcgctgccgtacgcaacgtcgccatcccgccgcacctggccgtccggtcgacgccgccgacgtatcacacgctgccgactcggccgctgctcaactcggtctccctccccaacttccagggcgttgggagcgcgacggccgagcgtgcacgcaagctctcggccttctcgtcgcccggcttccagctctcgcccttcccaggtcagccgccgtcgggacaggtctcgcccggcgggacttttggctcatggctgcaggaccagacgacgaccccttcgcccgatgcctaccgctcgaacacgcccggcttcgcctggcccatcgagccgcccgctcctcctgctggcctcggcctctctggcgtccggccccgcagcggcggcccctcaatcgacacgctcgctcggccaggcccgaacggcgcttcgactgccaacggccaccgcgcgactctcagtctcggcggcgccggccacgccccgccgcaggcgaccggcgagcgcttcgccccgatcgtcaacagcggcaacacgggtccgatgacgatccagcaaggcgactgggcctgcgggacgtggtatgtcgtgctcgcgcgcttggagatggtcgtacgtggccgtcctgtcgctgatgaacctggatcgaccctctagcggcttcgtcaactggcgccggcgccgcgtctgcctcaagtgcttccccttcgccgagggtgaggagtctcctctggctgattttcttctagaatacaggttgaccttcttcaccgcccgttctctcccttctgaaggcaatgagctcgctggaggtaatcttgctgcgtgcgtcacgcgcaacccccttttgtgctcggtccaagcgctaactcgtactttgtctcgtcctcgcagatcggttctgctcgtcactcagctggcccaagcgccttcaattccatcgccggctgcgacccttgagggtcttcccggtagccctcacacggatgcctcgttccagccggcgcagggcctgcccatcccgaccggcagccgctccttcatctcgagcggaccctaccagccaccgccagcatccaacttcaacccgccctatgacgacaaccgggccgagcgtccggtcgactttgacgtttttggactcgcctcgcccgttcactcgccgccggcccaaaccgagccgggcttctcgtccggaccggccagcatcggtggacgcagtcgcaaggacagctttgcgcccctctcgcccatcggcgccgaggttcgctcgctcgccggcacgtacgccaacggcccgccgcagcggccgacgcccaccagcaagtcggccgcctcgttgcgggacctcgcgcgcgactgggcagagcacgagcgccagctgagcgaaggcatgctcggcctctcggtgcgttgccagggcggtggcggcgatggctggcgtccgtagacgagcagggcaacaatagcctcagcccgcggaacccacgagggcggccgggtggccgctcgggtcggaaaaggagggggtagagaggagcggaaggcaggcgggcaggcagcccggtgccgcaggctggctcggaagccagaaaacggatcaagcaggcctacatcgaccggaacctcttgacctcaagagggcagcggatgccctctcatccaatctcacaacgacggccgccgacggtcgtccgacatgcgcccgtctcccgactcctctccctccgcgccttgtaccaccgcacatgcatccctctctctcatcatctcttctctcttcccttgcacagctcgcccggccgacgtctttcttaccccgttccgatcccatgacccgtacacttgcgaagaccgctcgagcaagatgacgggcggctcgtctgcgccgtcgagactcattgtcgggcctgcgagagccggcatcgtcccggtggttgtcgtcgttgtcgagcccgtgccgccgtctggactgcgcgtcgtcctggctggagaggctgagggacgaccaccgccctcggccgacgcacgtgagagggcgagccgcctgcctgaagtcgttttcacggccaaaacgatgtcctcgctcgagaccgatctcatcccctgtttctccccgtcgtttgccctgatggccctcatcgaacgctcactctcgctcgggccctttgtccgcctgccggcgccgcacgccgacgtcttgctcacgacgcttctcccaggcgacgctgcagcgctcgtcgagctctacaattcgcctagcatcggccagcggctctactcgactccgtttccgtacgtcccgtctgttcttcggctcgatctcgccatgcatcgaacttaccctctcttcgtaaccgccgcagcttttcgacagcagacggtgagcaggcgatcgccagggaagctcctgcggcggctgccctgcttgctcatctcaacgctagcgaccgtcgaccgctcaacacctacccgttgaccgccatccgcgtcgagagcgaaggctcgacccgcctgattggcaccgtcggtgtccacccagccgacccacacccggccttcgcctttcgggaaggttgctgggacctcggctatgtgctgctgccgtcctacggcggacgagggatcggcacggctgcccctcgggccgctctcgcagcttgggagcagctcgggaacgtgaaggcctttggcgctttcggtgcgtcgactagtcgctcgctcgtcgcgtctcacgtcctgactaattcttccctgctccgcgtactcgccagtcgagaccgacaacccctcctcgatccgcgtcctgcagaagctcggcttcgaacatgtcgccgagtttgacgaggactggcccgaggccaagggcggcggcacgcgtcgtaatatccggcttgagaaggttgacgcgcgggccgagtcttgaggaaacaggtcagtgtcttccctccccttctccacgggcgcgcgtgcctccatcatctccaccacaagaagcgtcgggcgacgcatgatgtctacttgaaaaacaagtttcctattagccccaggcgatcaaagccgtgccgaaaaacatacccgagcgaacaactcactactgattcgtcgcccacgccactcttcctcgttctcgcgcgtccttctttttttttcggacaagccactgacccttgctcctcgttgactcattttcgcaacagacctcctctcgaccattttctcgatttcggcgctcgtcacacgggcccacttttggccgcccaccggccatgcgagcgcgactcgtcgaatcttgatctgcttgacgcgcccttcgcccggcccactcccgagtgggaatgtcgagcctcagcacttgcagaatagacgatttccagcgcgggctcgccatccgttgatccgccaggcaacgcctacgttgcgctctccgtgatccatgtgcctggcccaaagtcctctgcttcgtgtcgcgtcaggcgctgcgtttggagacaacgcggccggccaccgtttgcaggggcccgtcgtctgcctcagccgtacatgtgcgcggccgctttcttggtctctctgaccttgtttattttttttgcgagcggcatggtatcaatgagcgtacaacggggtgtgtgaagagcgattggtgtgagagtggtaagcgacggaaaagggcgttgattggagtggagtgggtgcgggccgagcgcgatgcgaggagggggaggagagggtgagaggcgccgatagatcataagtggtgagggcgagaggacaggtctgcgaaggacgttgggattgagtgcccgctgtgcgggcgaggggagaaagagcagagtgagaaggaagccctcggtgagagcgcgcgatgtaggagggggaaaggggtgtcgtcaaggcagaaagagcgggcagggaagatagaggaggcgagggcgttgcaggtcgagagtgttcgtcgggttgagggcgtctagtttgatgggaatgaagggcggccggcggctacccttgcagagggagcagaaggtagtcggacctgtaaagcgacgacaaagcgtcagttgcccagatcgtgtcacgcgaaagctgatgcgtagatctggaggacgtacgacagtgatgggaaaagaagggctgctgcccggccgtcggccgctcacatctcgacgtcctcggcgacatgggccgagttgagcgagcggcgcgaatttgagctcgcccgccgggcccagctggccgacccgccgctcagcggagggacgttgctcgcgccgaatccgcctccagcaccgtttccagctgccgccgtcgggtaaaagcccgaaaggccgagctcgccgccaccagtctgctgctggtcgcgcagcgcctttgtctggctccgcgtctgcctcgcctgggccggggcgaagcctcctcccggcggcgggccggcaaagccaaacgggttctggtggtgcgccggctcctgaggcgaggcgacctgcgagtggaaggccgagtaagatgccggcgagccgggcatcgagttgccgctgacgggcgtaaacggcagtcttgtcggcgggtggtgtggggacggcgcgtagcctccatagccaccgccgctgctccccgaggcgctcccttcgatgaaggacgagcccttgttgtacgacgactgatggctgagcgccggcggccgctgtgccgacatgtgcgagctgaacgagttctgctggccaccgttcgcggccgactggaacgacgacggcggcggtggcggagggccattcgagcagtggaacgagttggccggcgtcggctggccggcctgggctgactgggacggcaagaagagcgtctgcgagaggtgggcctgggatagcgggaagaagggcgagggcagaagagccggtgacgcgttgtagggcgagcaggagggagtcgtcagccctagcagcgtttgaacttgcacacggaagcaggcagcgagaaggcagcgaggatgagttgacgagcaagcccaagctcgggtgagaggaccgagaggacgataggtgaggcggtagagcgagacggtgctaacgcttcggccgttgcaccgatagccgctcctgacctccctccctccgacgacgcctgggcccgaacaggcctcatcgcgtggcctccttgcagctctagagagctcggctctctcactagagaggtcacctgctagaaggcaggacctcgcgctcgacatgcaagcggcgtcgtcccgccggtgggcggccggctcgcgggacggatagcgtcccgggtgttcggcctgaaccttgaccggccgcaccgtctcgctctcctcccgtcgtttctccgcgagagagatgggtaggggacgtacgtgcagtgcgcggagatccatcgcctcctggccaatgcacgagccgtttagactcgagacgaggtcgtcaaagtcgatggcggccatcgtccgcgaccggtggtcggatagcgagcgaggagcgggctgtagcggccgggagcgcgacgaggctggaggaaggcgaatcctctcaggcgcgacgaggtaggaagcgagcgagaggttataggactagagatgcggatgctgtagcgcgagaggactgcaagcaagtcgatggatggggtgtcaagtcgaaggtggctgttgagtgggcagagaacttgcggccggctctctgcccacgactcgcgccttcgatcgcgccgagggcgaaagtcgaacccggcccgcctcgcagtcgttgcctcgggccggccaggccgcacagagcaaacagcaggaatctaccgacgctgccaggactacctctgctggccagcgagcactccccgttagacctgcagacctgcctgccttcctgcgcagcgttgctcgcctgcctgtcgctcggccgacgacgccctttcgcagagcgtcgggcccttcgggcgagagacgactggccccggaccggacagcatgcggggccgcccgacacgacgggccgcgccttccttcgcgcgcgatgcgtcaacaagaaggcggtcggcagcagcgagacgagaggcttcgagagagcgcgcaacagccgctgtcgttgtagctgaccttgctctcgagatgcgacctgctgctgctggccgacgacggctgacaacgtggtcgtctcctgccggtgacgtaggctctctatcgggcggaggcctgggcccgcttccggacgcgacaagggcgactccaacttgggcgtcatcggccgccatctcatcgcacccgcagagcattccggcaagcccttcaaaggaaagagctcgccctctcttctcgctcaacacccattcccaactaccttgctctcttccgtccctcatttcatccgctctcaaaactatgtccgactactcgaacctcaacctcggccggcccctcaacgaggcctcgcacaccaccatccccggcgaccattcgtctggcctcggcggtcactcgtcgtcaggtctcggcggctccgccccgctgaacgctggcacggctgccccgggcgactacaaatcgtccggcgccgaccagggctttgcgcgtgacgttctcaacacgctcgacaaccggacgtcgcacgctggcaccggcgccggcttcggcggccagcagcacggacagcagaccgtctcgggccagtacgagacgacgaaccctgcctcgggcatccagcgctcgggcgagagcgagccgcacggccttcggtccggcggccacgcgcacgccaacttcccggccgagtctgacacgctcacctcgggcgaggccggccagtttggctcggagaacgacgctcggcggcaggagggcctcgtcggcgctgctactggccaccaccaccaatcttctcaccagcacgcctcgggtctcaccggcggccacaccggtgcgtccctgtccacagtctctgtcagccaaggtcgtcgctgattattgtctcatctctcggtgcaggcccttcgtcccgtgagatggaccaggagctcaacgaccccaagcgcggcctgcccgacctcgtcggccaccccgtctcgtccggctacggcctcaacaagggccaccgcggcgacgagtcgtcgcactcgcactcgggtgccggccttgccggcgctggcgcgctcggcggtgctggtgccctcgccggtgccggcctcgctcacggccatcactccgacccgacggtcggccacggcggtgcgagcggcctccagggtggcgcccggccggcgcacgactcgatcctcaacacgaacgagaagcccaaggagctcgagattggaggcttcaaccctaagggcgccgcgctcgacgttgacccgaccgttcacgagcccaaggaggtcgagcgcatctcgtccggctcgggccctcacgctctcgtctgggacgaggtgtcgaacaaatacgttcaccggcgcgagctcgagggcaacaccttgcgcgagcccactcgccagtaagagtggcagggtctcccgccctgctgcgcttcctcttgcccccccgccttttattgctgtaggaccgtagccccaccctcctcctctgtccaactgtatcccgtactggtctccattttatgacggcattcatgctatggcttttaactgtgccgaagagagactttgcaacgaagaaggtgggtggcaatgaggatgagcgacggctcgcgtgcgtcggcggagtcggcgcagcaccccttaacggcactcattgccgaatgatcctcctgcggccgagcagatatgaaagagaaagccagacgggccacgacctgctctccttcggcaagacctccttcggagcttggagcaggtagcgtcacgaaagtggtcctttgtcggacgatagacgcccttcctgccggcagccggcggcgtcagccgagctcgcctccggcgcgggccgacagacgagcttcagcccttctctccgaccaaccagcatctcccccctcgcctcttaactcttacacccatgacaagccctacctacactcagatcgacctcaccgactttgaccggcttatcggctcggcgaccgaggtctcgagcgccgccctcggcggtcgcgtgctgagcgtctccgacgagtggttcgcgccgtaaggagccgctctcgtccagcatatcgctcagcttcgacttaggtcgctgatccagatttacttactctcatcgcagtgcgagtgacctcctcaaggtgcacgtacgtctgagctgtgcctgatctgtgacatggcggaagtcgagggctgaccggcgagatgctgcggcccctcttcccctccggcttatcgctccgtgccctgccctcctctcagccggccgtcaacatgaagggccagttcgggccggccggtgctctctttgacggctgggagacgcgcaggcacaacccggaccacgactggtgtgtccagcactcgacgtgctcggaggcatcggcagctcgccagctgacccttcggcccgtgcgtgcgcctctcgcagggccatcatcaagctcggcgtgccttccgcctcactcatcgcgttcgacatcgacacgagcaacttctctggcaacgaaggtccggctggctcggtcgagggcgtctacgcgccggaccgggagccaacgaacaacgacgccgaggtgcgggcaggcccgactgcgcgctcgctcgccagatcagccgaccgactgacatctctgtccttcctgctggcagtgggtctcgctcctgcctgtcgtgccgctcggcccatcctctcggcacctctttaccattccgccaagggagaactccttcacccacctccggctccgcatgatccccgacggcggcatcgcccgcttcagggcttacggcaccgtccgacctatctttgacacaacgcacgcctgggacgatgccggcgcagccgctcatgctgatggaccaggccagcgtgaccttgcgcatgccttcaacggaggacgctgcgtctacgagagcgacaagcactatggcgtcggcgccaacttgctacttccaggtcgcgggtgcgcttctcctgcctgtcattctctcggaaggcaaaagatgctgaccagatcggctttctgttcttttcagtaaagacatgggcgatggctgggagacaaagcgctcgcgaacacctggtcacaacgacttcgtcattgtcaagctgtgcgtcttctcgcagcggctcgtatacagcgtcaccgcacgctgaccttcggacggcagcggcgcaccgggctccatcttactccttggaatcgacacactccatttcctgggcaactacccggccggcgttgaggtccatgcgatccactcggtcgaggaggtcccgccgctcgacgtcgccgctggctggaccccgatcctcgaccgcgtcaaggttggccctcacgccgagcacttctaccccaccaaggccggcgagcagacattcactcatgtccgcatgaccatctttccgggtgcgtcttggctggctgcgcatcggaagctgctgcttttcggactgagactgactgggtttaacctctcgggatggcagacggcggcgtgaagcgactgcgagtcttcggtcgccgtgccgacgaggagactgtagctcctcgggcaggcgaactcggctcgacgcttccaacgtcacttgcttcgctcgtctcgtcgcttaagggcagcgtcgtcggcagcggcaatggtggcgtcccggcgctagtcgctgagccgttgacgacggccgccttcgcaccatacggcgacgtcattcaggccttcccctcgccagatctcgcgccgccgggagtcatgtgcacgtcggccaacaacggcagcgcttggaagtaccatcggctgagcacgcctgcggcgagctacccggccgacagtggtgcggtcgccgccgtcagctgtttccgcgccgtcccgccaaagggctttggcggcaaaggctggaagggaaagtttgagtcccgcatgttcgagcggcacgttttcacgactcgtacgtccgtgctgccgcaagaggatggtctcaaagccggctgaagcacgcgctcgcaccttacagagaccttcattccaatgggcaagagcgagggcgagctggcacacggcggcgagggcatgctcatcatcgtcgctcagaacggcaagggtcggtcgctttgttcggtccaccttggtcagtcggctgacacggcgccctcattgcagacgacgcgccgaaccagtcaaccttcaaggccttcctcgcatcgccctcgcaagggctcacttacaagacgggcatctggcaccactcggtcctcaccctgtgcgcctcttctctcgccctgtcgactcgatcgaggtgacagctgaccgagccctcgttccgccagcgtcccgaccgactttgcctgctttgaggcgcaaatttcaaccactggcgaccgcgtagaggattgcgaggtccggcataaggccgacggcgagcctgcatacctcacggtcgaggtcaagtagaaggggggggggtaacgcatgcagaccacaggccgaggtgcggtgtaacagagcgagagatgcgagaggtgcggagaccgaaaactatgtggcagcaagttcatggaaagccagagaagtgaggaaagagagagtgcgagcttgcttagagcgtcttgacccagcccttggcagtcagcgcaccggcgacgatggaggcaaagaccttgtgaccggcggtcgtaaggtggacctgcagattcaaacgtgagggcgtcagcgctgaagtcgcatcgtctagtgtgcgagtggggagacacaccgagtcccagtagacgtagctgtcctggtccttgcacttggagtactggaagccaagcgactgctcgagcgtcgacaagccgagctggcaaggggtggcaaacgtcgtcgagttgaagccgtaggcctcggcattggcgcggacggcgttgacggcctcgtacgggtcggcgttggtgatattggccgactcgagggcctggaggccggtccggtacgacgaggtgatgacgtcgagcgcctgcgagagctcgggtgtgaggacgcgcgaggccggcgtgtcgtcgagcgacggcagattgacgagcgtgatggcggccgcgccggcagcctggagcgagtcgacgccgctagcaacggcgtcgatcaactgctggccggtgatgttgagcccgccctggaggacggcgagcgcatcgttgccaccggtgaagatgatatggagcgaggacgcaagcgactcaggcgtcgtcgtgttttcggcgaggtacatggcaatctggtcgagggccgagggaagcgtgatgttggcgacgccgaggtcaatgatggccgggttcagcttgttgtcggtcgtcgagccgccggtagcatagtcgcggagcgcaatgggccccatgcgccgggcgaggtactcgggccatacccagccgttggagaagcgctgggaaagcaggagtatgtcagcgaacagggagcgaggtactgcgcggtcggtcaggctcgacgcaccccgtcgtagtagtactcggagggcgggttcgcgcccttggtgatcgtagcaagacccgttccgttgtctgagagcgaatcaccgaactaaagcgcgatattgtgaggccgaggaaaagaacccgatgaggaaggctagatgggtcagtaacagatgccgcgtcttctttctgggccaaaggagggaagggacatacgataaccaactgggtgaagttgtgctccagcacgccaaagccgtcgcggaagttgaacagggcggccgttgcgttcagggcaggttgggcggtgccgttggtggccgcatcagggtgaacgggctccgggccggtgttggcacgatggaagagggggtaggcagcagcctgctggaccgaggccaggccgagggcggcggacgagaagagggtagcgacgagcatgcgagcgagagagagagagaaggtggagggaaaggcgaaggagcgtcggaggaggtggtggtcagtcgggaagcgaggaaggctacccttcgctcctgaaaagggtggctcgctaggcggctcgctgggcggctcgctgcggggacgatggtgagacggcagcggtgcccgcttccgccaagcatagagcccggccgcgtggtcagcgcaggcgatcgaagactcggttgacgacgccccgaacacatgccttggcaggaagcagggcagaggagagcggatggccagctcaggtcgaggtaatggataagaggacgtcgctatcgctcgagtcggaacgtagtcggaggagctggtcgtcgtcgagagcgcggaggcggcaggtcgaatcgtgaccagtcgcgcgcagcagtcccgccctgcaggtcgctctcgataaaagggagatcgtcaggagatggtcgtaagtggaggtaggtacagtggtcggacgtcgggcgtgatacaacgcagatggggcgagaagcgagcttgttcaaacatagggtggaaggagagagctagtacatgaagacaagggtcgagccgctgtggcccttgaactcgacgccctcttcgaaggccgcccaggacgacgggaggttgaagtcggtcaccgggatgccgtgtagcgcccgtgagcgagcgagggcgcgaggtagagccgggatctgcgagaagaagaacagcgagggttaggacacacctcggcggcagccagacacaccggagctcggggacgcaccgagacgtgcaagaggtgccgttcgaggaggtcgagcttttggccggccttcttgacatcggctcgtcgcgagagcttgacgttcacgtagctgtcgacgatggctcgcaaagccgcctcgtccaacttgcgctctgcgacaaagagggtgcccgtcagcgtcggcggcgatcagaagatctgagagacggcaaggcaccaacctggtcgagcgagagcagcgagtgttgaggagtacgtatcaaaggtcctgcgaataggtggggctgtcgatgagtcgtcggaagccgtcgacatcgtggacgcccaagggaagcgcgtcgtggacagagtgaggggagggtggatgaggtcgatgatgcccatggtggagttctgcagtgtagcgggaggttctgcgagcgggtcaaacgcaaggccatgggggaggtgcgtttgacgaccagacacaccttgagcagacgcgatgtgggtaggaggagagaggacagcgagagtggaggatcaagacggcattctccagtcccgctcccgctctgcagcccttttgaacagtctggccacccatcgcacgtctccgacgatgggcggacaagggcgaaagtgattgttcagcgggccgtcgctcggtcagcagtgcgtgactcgacgggtccggctcgcacgggaactctgactcggaagcaagggagcaagtcgtggcgagtgatagcgatgcccgtcgagcccgagatactctctgtaagcggctgtcagcggtgctccgagcccagcctatccttggcctcggaaggggatccggcgggagattgcctcagcggaagtctacggcgcgcgagtgcgagagagggcgcccgaccagcccacgggccctccccatgactcgatgacgtggttcagcgcggaagagggagcatcagcggaaatatgtgaagcctgcccggtcagtgtacgatcacagtgcggacccggcaggaaggacgactagttgcgggtcgacgtttcgatgcagggcgcgacgaccaagacgagctcgccgacgacactctcctccctccgactgcatccctccctctttccgaatccgacctcagacatcggccagccatctctccgagcagctctaccttcacgcaactcagctggtgcctacctttctcggaccaacagctctcgatcctcggtcgcggtcaaccctccacgccgcccgcagctgtcgagctcgacctcagcctcgaacgccccttgacaccgagacccgatccttccctgagagaagtcgtcagacacgatgagcagggacgcgatgaagctgtttggtgtcctgagtggcctgaccctaggtgcgcttgcctctacagtcagcagaggctccgatcccactagaaactaaccggtctcgctcgtctgccgggctcgtcctgcttccgccaggtgtcgcgaccggcctctacatttgggaccagcccattcggcgaggcatcgaggacatgtgcgcacactgatcttcactcgcccggctcagcgcgaaggtccttacggctgacctccgactcgtcaccgcgacagcacgaaggcccgaggcgaggagctgcacctgccgccgtcagtcgtcacgggcagcagcgagatcgcccgactcaagacggacccaaagtacggccttcagaggcagccgacgaggacgaggcactcgtgtgagcgtgctcgctgagcgatccgtcctgaacttttgccctctaccctctcgcgcaggccggaaccgccgcccaagccggcgccaaagcagacccgctaccggatcatctcgggagtaccgcagaaggtcgaggagaccgagccggtgcaaccatgagccctgacttgccacctttgaggccgctggcgcagagtggagagccttttggtgtgcaacctctgcgcagccggcctctctggctggaagcatttaagacaagggcaagaagaggcaaggagcgagggtcatgccagaggtcccaatacagatcagctccctcagaaggccggcgtctggtcgagctcgctcaggtcgaagccgtcgtcgctgcctccctctgctggcagaggcggcgatggcggctgggcgacctgatctgcggactcgtctgtcgggtcgtcctcgaccggcgtttcaaccggctcgtcgtcggcgtcgtcgacctcgccgctggcgccgcgctcgatctggctctcgagcccgtcgaggaaggcgaggctgccaaccgtcgagccccggaagcggatggggaactgctcggcgctcccaccggggatcgcgctccagacgagccgctcctcgtgtggggtaaggaagacgcgccggacgtcgtccgacagtcgcgggtccgggcagggctcgaagtaagggttatcgctcgcgtcctcgagagctgcctcgcgcgcagacggcttgaacttgtcgggcgcggccgatcggacgcaggcgaggatccggctcgcgtcgcgctcagtcaggaagccgaggtggaaggcagcttcgccccgccgggcggcgagcacgagctcgtcctcgtcatcgacggtcgagaagcggcagagaatgtcggctgaggcgagcgcgccgctcgtgagcaggtccgggtacgccgtcaacagggctggcgggagccaggccgtcttgccggtcgggtcgcgctcctgcgagaggagccggcgcaagcagagctcgtagagtgagggcacggggtgctgcgccgcagctgggtgggttgaagggagaagggtcgtcgcggtcgtcgtggtcgttgtcgtcgtgctgctggccgaagtcgaagccgaagccgtcgtgggtcgtttcaagaaggggttcgggaagacactgcttcgcttgagatgcgtcatcgtgagaatcgtagagggaaggtaggactggcggtggcaacgagtggggttcagcgctcggagattctcagcggagaaaaccgagattgacccacgatgctgttgcctccgatactcaggctctcgagattgacgagggcagagatggcggccgggagggattctagatggttgttgcctgaagaagggcaaggaacggtcagtgaggtgctcgagccaagagcagtgggcactagcggccgcacgaaggtcgaggtgggtcagcttcttgagttcaaagagctgcgagggcaagcagcggatctcgttgtggtcgaggctgagctcgatcggcacctgtgaggcgaggcgcccaccggcaggcgagttcggcgacgccgcgacgggcgcaaaggtgacggcccggccggcggcagcgcgattgccaagcattcggccaggcgagggcggtcggcctgggagcagccgagcgcgcggggccgtgcctgccgtcgaggcggagaggggcgacgacggcggcgtctcggttgtggcgaagccgacgatcgtcgaagctgaggtcgaggtcgatgcagtcgaagctgaggacgagaaggctggacttcctggtcgactaccgttgttcggctcggcacgcatcctcgaccgccgaccctgcagggcggcaaggttggcctgggctgccgttgtcgacgccggagcagacgagactcggctaaaagtccgcgtcgccggcgcaatacgcggcgaggtcactggcgagcggtgcggcgaggcatagttgcggccatgcgagaggcccttgtactccttaagagcaggcgatgccatggcgatatagttgttcatgtcggtcaccgtcactgggatgaacgtcagcttgttctggctgcagggcggggcaagcggaagtaagtcagctctcgcgcgctgatctcgagaagagagggaaacgatcgcacctgagctggatctcgaccctgcccgacgcgacctgatcaaagcctttggtcatggcggcctgccagcgggcctcctccgcggcgcgcgggtcgaccggccggcgcaagggtagggcctgggtcgagctcgtcgtccgtaaaagaggcgtcggcagattcgtcaagtcgtagttgtccttacgaggcttcgaccgggccagcggaaagcctgtcgatgggccgatgaacatcgaccggtcggcgatagcgctggcgctcggcccaggtgctgccagcggacgaccaaagagctcggccgggaacaacggcgggccgagctgaatggcaggctcgagcggcgagccgccgacctcacagcctgctaccgcaaagtcaggcgagccagatggcgagcagccaaactccgacgccgatgaagaagcagccgagacggacgggctcgggtagtcgaacggccgcaacgacggctcggggtcttggtaggcgcttggcccgccgttgctgccgacgccgccatgcctgccggccgaattgaacgactgcgacttgcggaagcgtcgctccgagtcgaggcccgactcctggtagacgttgcccttgctgctggcaccgaagctgcgtgcgagtaaaggagacgccgagcgagatcgcaagggagtgggcctcttggtcagctcgcgtgcaagggaacggtccgggcgcaggtcagcttacgggtccatcgctgatgtacggcacggagcagaggccaaggagcaacgaagagccttgtccctctgacgaaaggagcagtagatgtttgacggccgagctcgagggtgggtgacgggaatgacgagagagaggccaggtcgaggaaggaagcgcgaggtcgcgaagtcaagccgcgtcgcgaggcagcgggcgggcaacgccggcgcgaggtcgggagaatccggcggatgctctgctccttttcgggcgagcaacttgaaagcgagcagcgtcgaacctcctgcctcctgcctcgcaaccagcatctcctctctctctctccactcggttggcgagcctggctgctcttccaaagagcggtcagatcttccaggagggacgggcgcgtgcgtcatctcagctccggccagcccgtctgtgtcgagctgtcgagtcgaccactcgcgtccctccacttcagaccttcgtgcgtacatcttcctgctctccgacctctcctccctccttcctcctctcctcccttctcatgacgaaaaaaactatttgctgtaaccttcgttctgcctactccaactgcctagcgggctctgggggatgacgatcaacataactcatgtctactgaaacacactcctcacttcacctctatcactcgctcgcgttgctcctctcccttcgattatgtgactgaccttgtctcccttattgcgaacgatcagatcaccactttgtactcgccccttatctcatgttgtgtctctaatcgagctggcctgtctatcgaaagagagcacgtcgcgcactttggcgacttcgcccatcctcagtgcagcgactgcgtcagggccgcacgcaacagcgccaggagagtggtcgctgactgggtacgaccgatgagccactgcttgcttcttccttgttgctccctgtagacccttcgcggcgctaagaccccttgtgcaacgacatctgatgcaaatcccgccgaggtcgtctattcgactttgtagatgcccgcgccggggctcggcttgctctcgagcacggccacccggagctcgtcgtccgtcagcctgacgtagggcttgtagcggcgctggagggccttgcggaagacggcgatgtcgaccgagggcgggaggagcgagacggtgcagccgccccagccggcgcctgcgcaggacagagtcagcgtctcggctgcaagagaaaaaggcacaagagagacgcaccggtcagacgcgagccgattgcgccctcctcgcggcagatgacggccagctcgttgagctcgtccgacgagcagtcaaactcgccgtcgcaagacgccattgagcggtccatcagctcgccaagctggccgagcacggccgactcattggctccggactcggacgccgcgtgggagaggcagagcgagcggaagtcgaggacgcggagcgtctcggtcaggacgtgtcggacgcgcttgagcaggtggaattgagtggcctcgactgaccaggaaagagaggggatgacgggtcagcaagggcacccggacgagtggagaaagacggtgcaccctcgatccagctctcgccaaacgtctcgttcaaccaccccttgtcgagtccaaaccggtccgaagcgagcgcctcaatctcagcccatgtccagccgctctcgcccttcccatcctggccaaagagctcctcgacgacggggatgagcttccggaggccgccgacaaagtcgagcttctcggcttgggccgccggcgacttgaggtactcctcgagcgcgtatcggaggtgcggacgggggttgtcttcccgagcggggagggcgaggccgaggtgatgatgaaggagcagagaggcgagcgagcacctgaaccaggaagacgatgagagcgcagtcgtcagcacgtgcaggcgcaaggggagcagactggaggctggacgcactcgacgacgcgcaggttgtagtgccgcttgcccgtctcgaagaggttgtgcgtcgtgagcgtgttctgcatcgaaacggcgtcctgggtcagcttccaggcaattcgcagcacagcgacaaacagggagggaagcgcgcgcacagaaatgacgaaacgcgccgtcttgggcacgggcacctccttggcctcgagctcgggccagaagtcgatgagcagcgccgaggacgcggtcgagaggaccgatgcggcctggtccatcccacccgagttaacgccgacaacgcgctcgttcgcgacggccatacggacgaggcctcccgagtcgacgaggtcggccttgccattcaggacgaggaaggcgagcgtcgagccgacgaccatcgcagccgaggacgagagccccgcgccatccgggacagagccggtatagagcaagtcggccgccacaggcttccggtccgagtcggccgggaggtggtcctcaagcacgccgcagaagcccgccttgacgaagttgacccaaccgcccttgtgccggtcgacatcgagctgccacttgcccgactcgtccttccggggcgtaaaacccgtccgggcgtagcgctcgtcgacgttctcgacgacaatcaggtcgtcggaagaggaggacgaggggcgggacgagcaggcaatgagaatgtcagccgcgacggccgtcgggagaacagggaagcacgagtagtcgatgtgctcgcctggaaggaggacaggaagcagactgcatcagcgagagtcgaacggggcgcaggacgggaaggttagagacgaaccgatcaggctgaagaggggcgatgggagagaaaggggcgaggggcagaatggtcagcaacgtaagcttcgtgaccagcagtaaaggaggcgcagagagctcgaccgcgaaagctgggttctgacaacccaaaggccgaagctgccggttcggctctctcatagggagagaatggaaggcggggagagcaagtgatgaccaaggcaggggacgtacttgacccggccaggtgcgcggcagacatactcggccttgcggccgtagacgcgctcatacgaggcgagcaggtcgttccatcgcgttctgtagaggagcgagtgtcgagcatcagcctgcttgctgcttcccttcagccggagggaggaccgacgcctgttggacgtgcgagtccgggtagatctcctcgagcgtgcggtagagaggaatagggcggtgcgacggcagctgctcctttatgttggtggtagcggcggacatgctgtgcgatgcgaggggttgagtagtgcgagggccgggtcgtgcgagcaagctctgggaaggagtgagagagcgtcggagggaggcgaaggctgacccgagctctcttggacggacgagcgacgtctgcgggagccccgcatcctctctttccgcatggcaggcgatgcttcgccaacaggtttgaccttcgccggcaatggcctctgccgctcggccggcgagcagccagctcaacgccgtcatccaccactggcagccacccagcagcagccatgtctacctcagcagcagcagcccctactccgtcgtcgtcgttgtcttcgtcttcggcgccggtcgtcgtccactttctctccgattcgcgagccgagtcgatcctctggctgctcgaggagctcggggtcgactaccggatccactactggcggcgcgagcccaacatgctcgcgcccaagggcctccgccagattcatccgctcggcaagtcgcccgtgctcgagcacgccggccagacgattgccgagacgggcaacatcatcgagtacctactcagccgcgccttccagtccgagacgacggcggccttcaggcagtacccgaccgcggagggcaaggagacagactcgtactttatgttctacgtcgagggctcgcttatgccgatcctcgtcaacaagctcgtcttctccaaatttccggcgatgagcccgtggtacattcggccaatcatcagctcgtttgcgagctcagtcgacaagatgtggctcgacaagcaactcgtcacgcatctcgccatggtgcggcctcgtcgctcgctctccagatccgacctccactcagttgctgaccttgacggtctctctttccgccctccagatcgacgacgtcttgaagaagtcgccgaacggctgggtcgccggcggatctaccccgaccggcgccgactttgccctcttcttcccgctcaacaagctctcgaccggccggggcggcgacgtcccctgccccgagtcgatcaaggcctgggtcgagcgcgtcaaggcccggccggcgttcgcggcggcgtttgaaaagctcgccgaggcagagaaagcgtacgacgctggcctccacacccagggcggcgagggagcctcaacgacggccaagctctgagaacggactggcgtcgccaagcggctgcctttcgttacctcttcctgcaacacggccggcaacaactactctgctgtccctctacgcgttcagagctgtcctcactcgccaggcttccgaccttgtatctcctggcgctcgccacacctttgctgggcaagcaagccatgcgtctaagcggcgcgccctcctgcgccgtcgactgttcaatgtcccagacgaccatgcttttcaatgatctgcggcgcggccctcgaatgagacttgtgatggaatggacgacgccagcttgccagctcagcgggcagcaaagggtgctgccggcgccgcactcgtcgttttcagctcagcatgctctgtgccgcagacgcgaaggagcaagcgccatcgcaacagcttcccattctgcacacaacatgatccgcttacggagcagacgacttccaactgaatgacgaggcttggcgaaagcttcatccctatgacgctttgctgcccgcgcccgaagcggccgccgacaccggctctgcctctttggtcgatggcgccgagcggctgttgaccttgtcgtgccggtcgaggagaatggttgccgattggaggagtgcgtcgagctcttctggcaggggctcgccgcagccggcccagcggactttgaggttctcgtcctgcggcgaaagatccgtaagaattgcggcaaggcgagaacagaaggcaaagcgtcagctctaccgcctcgagtagggttgagattgatgctgaagaacgcacgacgaggtagacgtagccggcgaggttgtttgcgatgccgagcgactggtcctcgagcgtgctcttcaggtcctgcgtcgaaataatgtagttatcccatcgtccattcgggacgatagcccgcaggttgttggcgaagaaagacgacaggaaggccttgagccgagtcgactggaaggagacctgtcaggggcggggcgtcacggacggctggctgtcagttcaagagctcagggcgagtcgacgagcgcagctatagagcacgcacattgacgacctggaagtcggcccggtcgcgtagacggttctcgattgggtcgacaaatttgagcacttgctcctgagagtgggcgagaggtaaaggagacgatcaggaactcgcagcgctgcgtagctggtgctgaaagaggcaacgcacataggcaaactcggtgccggcgagcgcaacgatgctaattttgccttgacagaggttcgacgtgtggacacggtccttaccggacgagagcgtgctgccaaagaggttcggtaggtagagcgctttctacaagcgaaacgacgagtcgcagccgggttggaggacagacgtcgttgtgtcagctctcccatgccttgcctctgacacccgcccacttcaacccaagcgctggactcacatcctcgcggaagatgctcttgggcgcaatccagcccttgccgccggtccgccagctctccatgatgttgccgaggttgcttcgcctaaactccttcatgatcgcctgcatcttggccttgcgaaactcgtcgttgccggccggcatgaggagctcccagaagccaaactcgcgcggtgtcggcacgtcgggcacgccgagcggcctgttgagcggactcaggttcttgggcgccgtcggcaggtgcggcggccggtcaatcgtcgcgtcgtcaaacggaggcggagctggcacgggtggccgatggaggcgcacgccaggcggggcggccttttcaggtgctctccctgagcttgcgtcggtagaggagctcgaaggggtggccgaagacccggcagggccgccggccgaaggcgttggaggcggcgggggtgctgaggccaaggcgcgcaggccggtcgacagtcggctggcccagcgtatgccgagcgccggcagacgcgaggcagacatgagggcgatggaaggagacaggggatgccgaaggacgtgcgcgcaagctgtcgagcgggtagagatggagctgtgcgagagaggtcggtcgaaagtagaggttcggaggaaggaagctggagctcgctgccaaaacgacgaggggctgagccgcgctgccgtcgagacgattagtattggttcgctcactggcccttcgcacaagggaacgtatgaagtaaagctgcatatgctcggcttcagactgcagagatcattccgtcatcaatttgacgagccccgtccagagccgcttcatcacgcccggcatgccgtttggcttctgcgccgtccccggccgggccgacaagtcgcccgacgccatccgtcgcttgtacgcgtcgggttcctcgagctttttgccgagcgaccagatacctttcttgcgcttcctgctcaagacgaggttgcgaggtgatgtcagcggttgccaggcgcacagggagagcggacgagatgcacttggcgtctgcctcggccgtgtcgtaaatggcaacgccgagcttgccgtattgagcgccaccagcacggtacacagtggcccagccgtcacgaagcatcatcagtgaaagactcctggccgggaggaaaggcagccacggtcgcgggagcatcggttgcgcgacctgcggtggggtgaaatggtcagacatcgcgtcgaaatagcggtcagaacggagaatcacgaacgactcggccatactggtcccttcaggacggatacaagggcgagtcaggctgatgcggtgcgaaaagagggcaagagagccgaggacgcactttgacaataggaggcacttgatcgtccggttatcgattttatccttcaaatattgtagtgcctctgccgacagcggctgggcctggaaagtggagcgggtgtggagcgtcagcgatacggcagcggcagaattgtgtcgagagagcgacggcagggtgaggacgaacaggccgaccaaagtgcgcagcctcgggcgcgtcgacgccagcgatccgaatatgtagcgtctcgttccggagggctgtcgggaagaaggactgctaatcagcagtcaaatgtgcgagagcggaggaattgcaaacctttggcgtcggtcggcacgcttcgcagcaaccgccagagcggcggcgtatggaagaagcgaaagttgtcggcgtcgccaacgctgttaccagtcagaagagtcagcaaaggaagccagcttcggatcacagacgagtctgaggctcacctggtgacggtccccctgatccaggtcttcccttcgagcatgtgcgggagaacgtggccaacgttgcggatccgacgccagctccgccggtaggcctggaagaccacgatcgtcgtgccgcaggcgaacacggccgaagcagccgccttctcgttcggtgacagcttggcaaactgggcgccagccatctgaaaggggacgagcagcgtcgagagctcaaacgcagagggcatggcgaacgctcgacggctagagctcgggcctgccgagctcgagctcgagctgggagacagcttggcggcctcggcgaccgatggtcggtgcttgaggaccgtgagctgaggctcggactgcataggaggaaagagtagaggctggtccgagaggcgtggccgtcaggaggctcggagggagccttgtcgcagctcgccgggtggccttgcaagtcgccgcgcagcagtcgccagccgtcatcactccgccttcacccctcccagagctaacctccttcgagctgcaaagactgccagagaacgatcagcctggacttccgcgcgtcggtgctgaccttgagcggtcatcggcccaagacgaggcgactaacggcgccatgctggccgcctctcccgctcgcgcacgcgagctcatccgcccgtcgtgtctcgtcgacgtcgacgcccccttcgctcccgtagccggtagcctcccgacccgccacctccttcctgaagccgcgccatcgacggcatgaagtcttccgcctcgagctcgcctcacgaaatgctgtaaccacgactgccatccgccctcgtcaatttgcggcgccagaacgaccgacccgccgacgccgttttcctcgcgccttcaccgtcagatctctctcaacatccgtctttccgtccaccggtacgtacgtctgcccggatcgatcaaacagcaaggcgttcctcgctgacctgaaaataacctcagcctgagcagctcagcggtctcgacgggcaatggatgcggtcgtagatgcgccgatgaggcgccaggcacgtcgtgcgtaacctccgcccgcccacatgccgcaacacgctcgttgccctccgagtcgcctcagtcgtcgaggtcagcaagcccagaatgacctgatgtgccctctttatatcccctcttgccgcagatggccctcgtcgccttcctgcctgcgcgcaccgagggctactcttcgcggccggcgcgcctgtacgcgtacgtaccgccccgcgcggcaacggtcgaggacgactggccgcaagcctgcaccgtcaatccaagtctcgtacgtgctcgtctcttctctctgcgcaccgttcgcctcctgccgtcgtcgctcgagcgagagtgtcagatgtgctccacgaggcgtgtcagcgtccctgggtcgcgtcacctgagcgcgcgcatgtagtcaaccaggctggtcgaccactcgatccgaacgtgacggccgagaagcagcgacgtgcgacgacggtgagaggaagattctgctgctaggcgtccgcagcgcatgttgtcgattggcggtcaaggggtcaaaggtgtcgtgtaacgctggcgcagggctgctgctagggcggtcgtcgtacgcatcaggtcagcactgactttcgacactcgcccccctcgttcttcccatcagacttcggccgtgcataccgagaacggcaccatcagcaacttccgcagtcgcccgaagctggatcgaccgtcgattcctcaacgacgcgggcgtcctgggcctcggcctccggcagcgcctgcgacggcgacgacgtcttggtcggtgcatatgcgaccgagcgacgaggacgcatcgtcggacgcatcgtcggacgtatcgtcggacgtatcgtcggcagcgggcagcctgcgcgtccgcttgccctccctagggccgcaggtcgtcgagcggcggccgcaggagaagctgcgagcgagctgccggctagccgaactcctactggcatactctgcgtcggaagggcgaggggtcgaggggagagaagggagatggcgtgctaccagccggaccgatgctgatgacggccctcccctcccctcctcgcagcagcctcgtcgcccaggatggatgtcggcaggcaggcaggagctcgtctcgctcgccttctctgccggcggctgaccccgcagctgatgcgacgtttggccccgggcgagacgcgtcgtgtgaaggaagaggcgccaggcacccacttggcggcgggtcgccgctgcgcaacaaggcacgactcactcactcaaccgaccctctcctgtcctcccagagcctccctgacgctcgctcttgcgcggaggatgatttctgacgtctgctgatcatggtcatgctgcatgctatcgagtctgggaggagggaagccctcttgacggcctcaagctcccgcgagagggagtgatggtcggccactgggctcccatccgacatcgcatgatttcgccgcagggaagggcccgaaagctacaaaggcaggccctttcgccgcgaggaaggcccttttcccccttagctactcacatctgagacaaatcctccccgcgacttaatcgtttaaccagccttccaacctcatccactccaccacaaacatatcgacccctctcagcactcaccctgcccccaccactctggttgccgacctcgtcaaggattgctccttcctctagtgtacactcccaaatgccaccctgtgtactcgtggtgccctctgcccatggtactgggtagtgacggtcaagattggtgagactggtacgcctgccgccacagtcttccacgccggccagcgggttctcacccatgctgccggtgttctcgactgtgctcccctttcgagggcctggtgcgctgatgaggcgaaggaggttgtgcgtgttgcttcatagctcgcccacgacgtcacttgcgctctgcccgagggcagggccgagttgatgtcgctggtggacgagctgctcgcggggaggactgtcgaagaggtgagtgccgcagaggagaagagaaaggccgagagtgcggcgagggtgaagaagatcctcgcaaggaaggaggagctgcgcgtggagaaggtggtgctctagacgaagagccgggcgagggcgctagaggcagaaaaggccctgcacgagtgccagatggccatctggcgtgagaagacggcggagaagaaggccgagagggcatctagtacgtatgcttttcggcacttgtgactgaatcgaccgtctcgagcacgtcctcggacgagtcctatgtaggtgcccctcctcccgcttcgcccatcctccctcccgtcgtctctttcaaggtctcttccgtctctgctctctcttccgtcccccgtcttgtctctacctcttctaccctttctcggccggtctctgtgtcctcttccacagtccctcgtcccgttctcttgtctcgtcccgttatacccggccggagccctgcgccgcgccccctgaagcactacccggtcccgcccgctactatggcgaagtggcttctcacccctctcggccccaatacttcggcggccggcgagctcccggctccctgtggcccagatttctattcggcgctccgccttctaatccggtcaaggtgcgtccctccttctcggcctctctctgcctcactcttttgaccctcgctctccttcgactcgcagacctcgactccaccatcaagcacgacattcaacaaagactcgtccctctacctctcggccaaggtcagtctctctcctctagtgcgtccggtcgcgccgccttgctgaccgagtcgtccggccattctctcatcgtctcgcagaccgtcaacccatcgatcgacattttaagtctccgcaagcagccctcaagccctcaagcctaggtgcgttcgaatgctctccgctttgttgttcgctcgcatcactcggttgacttgatcgtgcgcgcgctgtctcgttccacagctctcaacctcaacccttcccttcaagcaccctcaagacaaaaacacgttgggcgagccctctttcgacggccccgtgcgtccttgctctcgctcgcgtccaccacgccgttccgacgttgacctcgttcccctagcctctccctctctccccctccgctttcgccatcaccgctctcgccatcgctaaggacgctcacccgcggaggctgtcagggaaaaacagagcgtctggccttgcttgtccgcctctcccatgccggtactctgcgctgacctgctggcctacctcttctccttcaccctttgtcttcgctccctcgctcgctcgcctgccccggctcctcggttgccggatctccccaaaagggctcacgctcgccctgctcgtctcgggcgaccgggcgagttgggctctggcctgcctcctcttccttcgtcggtgaaggacggcggccgactcggaaggctttgccgagcgacgctgcggcggcgacgcaatcgcagaagaagcaaagggctgcatgagatctggatggcgtattctgctggtcaatttcgccctttagcactacgctccgttacaacgctcgccactttctgcccagtcaaatcgaagcagaccgtcgccgctactcgacggtcatgtcgtcctggccgtcgccatcgtcgccatcagcgtgcgcgtcggcctcgccgtgtccgccatcattgctgcaatgtcgtctgcgaagaggcaaacgcaggagtaaaagaatcagtcagaagctcagtcaaactgatgagtgcgacatgagagacgcaccggcctccttagcgacactcgtgctcagaccggcctcgtcgcccgtaacctgcgcactcgcaaacaccgctctgtcgtcagtcagagcaacctcaggcggcaggtgggatgggcagacgcacgcctctttgtcctccttggcggcctcgactttgcgccgcttctcctcgagcgcctgtaggtgccgcttgaggccttcgggcccctagtggctgcggagcgcgagcgcctcgacctgcgcgagcctggaggatggaaaggtggatcacgtcaggtcccagctctcaccgagttaagcggacaatcgcgaaggagcccgaggacgcaccggtagccgcccgacttcgggagctcgttgctttcgccttcatacggcacgttgtcgggtttgaggagcggcagggtgcgaaactcgtcatccgtgacccgaaagaatttcttggcgtccgtcttgatcagcgtcggccggttgaaggccagagaggcgaggagtcgccactgggatggtaaaggatcgatgttcttgatcgggagtcgatgtacggcaagaggacgaccttttgaaccggacctgctcgatccacgtcatgttgttgccgcgactgcgagagagagggcgaggccaatggtcagcgccggctacgagtgcagagcaagttctaggactctaatcaccgaatctcctcgaccgtaggctcgtcataaatatagcagtcaaaggtgtcttcggcgacgaccgtgtctccaaggatagggtcgtagtgccgtttcatgtgagagtcggcgacgacggcctggaacgtggcccgccgcagcgcattccgctctgactcccccgcctgccactcagcctgcgactgtccccaccgctcgctgctgggcgcaccgccggtgccaagcgaaaagatgtggcgggcagagttgaggctgcgggagaaggggccgacatgggggtagacaggcgcatgcggtcgatgtacgcgtcgaggcagctcgggtccgtgaccttgcgcttccgcagccggcggatgcactccgtgacccgacagatgacgatctcgtacgggtcggtgatgtctgtcggacagagggcttggaagagaaccttcgcatgcaagggagagagaggtgtcagaggcccatccggcgaagtctatcaggcgacaagacctgaacgcacctgccagacgagactgttgtagcacgcgcgaaagaagcggcaggtgccggcgagcacgaggtggtcccggagctgtcggaaggaaggaacggttagcaaggcgacctggtcgacgctcggtcgcaggtgcagccagcgcacgcaccccgaggtccgagttgaccgagatgatcatgttgagcagttcgatcgggacgttgtcgaagctgacgttcggcggcttggcgaggtcgagccacgaggagaccttctgctcgagccgcgagcgacgaccttgttagcctggagatctcgaggccactgcggcagggacaggagcgaggcaggcgaacgaagcaggagctaaccttcttcttcttcgcggctgccttcttcttggccggcgccttcctcctcttcgaagccggcttcttgtcctcgtcggcgctctcatcgaccgtcgatggcgagctcgacgcttctgcggtctctgcagcgaccgcccagggcgagaggagggccgtccgcgtccgcgcagctccctgcagccctgtgcagctcggcgcagatggcacgcacctttgaccttccgctttgctccggagccaatcgttgaactggcggtcgttacgtgagtctctgctgcagatcgagtgcaagtgcaggcagaacgggtctgtcaagctggccgagtgaaagcagcgggagggaggacaacagcggcccgagctctcgcgaggaaggcgacgcacctcaacgtcttcaccacccgtaggagttcgttggcggccggctgattacgcaatcgcgttgagcgccggattgtgtagagcatgggaaggaagaggagttaggagagatggtcgaggtcgaggtcaaaggggaggccggggtcgacgcgacctgctgccactgcgcgcagcggcgccgagtatcccatgcgtacggccgaccgagcggacgcactcgtcaatgcgcaacatggtcaatcaagggacagctgctgtccagacgcagaaagtagcaggcagttccaatctgccatcatcgagatcggctctagctccagcactcttcgctccagcgcccttcgtcctccatccgctcgaccatcctcctggccgcctcctcgctgacgcccttgctgtcggccccgtcggcaaggtgctccttcatgaaacaccggacgacggccttcttgaccgcccggggcatggcgtttgacgaactagcaagagcaagtcgtcgtgagggtcagccggcgctttccatgcactctgaatgaagccggacgcaccctgagatgtagaatgagccgcgctccgagacgagcttcctgtaaatggcctccgagtcctcctcaattaggtgttggacgtaaagtttgtcctcctgcagaggcgggtacgcaaaccgtcagcggcgcttctccctggaacgacgagagcgagtggtcgcacctgatccctcgaaaaggccgtgcggagctcgagcaagcccttagccgcccaacgctcccagtctgtccggaagaggaagtcgcagtcgcgcttccggcagccaaagtagacggtgttaaacgtctcaccgagggcgacccgacgctggataagcgcgcggagcggggcgacgcccgtacctgggccgacgcagacgattggccggccggcgaccgctggcagcgccatcgtgccctcgaccaagtcgatccgaagctcgttgcctgcagtgcattcacgcaagtcagcgagcgcgcaattcgggacgagacaatcgaaaccgacggaccgatcgcgagtgactggaagaaggccgtgcagagcccaacccgccgagccttcaggcccgtcttgtactcgaccatcgcaaccgccagctcgagcttaccctggctcgagtcgcatgcgatcgagaactcgcgcggccggagcggcggcaggacctcgggcaggtagtcgagagggagggatatgccgcgaaagtcggcgagcgtctcgaggacggatcgtcgaggttgggtcgcgtacgtatagacgtcgtcctatcgtcggagggaggcaggtcagcatggtgtctcgttgcgagggtaaggcattaaccgcaccggtccttctaccggatcgaggaactcgttgagcctctcgacttcgcgctcatccgtcgcaaagagccggagccactggaagaaagccctcgttgggatcgcgctcaagtcgacagatcgccggacgagctcgaacggcgtgatcggctcagtcgcgaacgacggcagcggaggaggatgatgcagataatagtcgtcgtcgtccgagtcgttttccgacccgccatcatacgacggccgtgcatggtgaccgttcgactgggttccgtttaacccgccgttcgacgactcgccgtacattggcggctcccagacctcctttcgcctcgtcaagaggaccgaccgttctggatcgaggtgcggctgaagctcgaaaaagcgctggacctggctattagaatttgtcggctggatccgcgcaatgccgccaggctgccagctacccgggacacccggcggtagggcaaaagtgatgagccggacatcttgcgtccagtcgggggccgtcattcgctcgaacgactcgagccgcgctcggatgccggacgaggtcgaggctgcaggcgacggactgaatgcctcgaggttgagcctctcgacgagcggcgagagggaggaggacgagtcgaaggaagttgcaatgtacagtgaagggagcagtgcggtggccggtatcgggggcggaacagctgctggctccgggtaatagagcttgtgcaaggaggtcaggagcgtctcggtgaagcggttggtcgtctcctccagcctgtggttgggttaggtcggcaaagtgtcagcacgacgtcatgccgaggtgacttgacagggcaagactgacccgccggacgaccgctcgtccgcccaccagccttcttcaccctcggtgccctcacgtgcggcgatctcctcagccccgagggcgagcagccgcctccgccagatcttgccgacccagttgaagcgctcgtagcccgagtcgccgcagccgagcaccgcgaatcgggccgtctcgagcaggtcggccgggaggccctcgcgcatcagcagctgccagagcggcttgaggtcggcattgggctcgccggcgcccgtcgtcgagaggaggaagacaacgggctgtctcggcgcgagcaggggcagggcgtcggccgggaggctatcgacgcgcagcggcgggtgggccggtacgcgggcgagcgtgagcgaccgatggagcgcctgagcgagaagcgcggtcgatagtgttgtcgtcgagtatacgatcagagcaggctccatggcgaggggagaggaggctaggggtgccgtcgcaccacgagtcaatggtgagtcgggagtagtgcggagtcttgacgccgatggccgcttcgagctcgtccgggatcgagctcgacgaagtaattagctgggagactactcgccgcgttcgtcccgagtcctccaagtagatgcaaggcgccgctagcttgtcgatgagctctagggagaagcttcggaccgggcggccgataaatcggcgggcgaggcagtggtcgcgctgcggtgaggtcggctggacgggctgctcgtccggcgagagcggggcgaccaacgcgtaggtgacgggcagaaggagaggtatctgccgaattgcacgtctcggctcttgcacgcttgccttgctaagcctgtgctatattccggagggtcgtctgctggtcgtcgtcgctgtcaggctggctgcttcggagaggcgagagagtggaggccctgcccgtcggcttagggttacagcgggcggcgcgcaggcggcaggcgcaggggaggtttctcgacgcagcctgccctgcgccgaccactccccctttctcccagaaccccctcccttggcacgccaggccagaatgtgcgtgttacatacgacattaggatggatcgtattctgacgctcatttcccgctcgccaggccgccacccgctgcgacttccaccaccgccgccaccgccggcgagcccgaggcgccgccgtcgacccggctgatactgctctcgcttccgcaccacctgacgccgtcgtcgctccgagcagcactctctgcgccgtcgtcgactccgacagcatcgtcgtccaagacgcagccgccacctccgtcgagcgccatcaccgacctcaagctctattcaggccggcactttgcctttgtcggctaccggacggtcgacgaggccgttcgctgcaagaagtggtgggacggcgcctaccttgcgggtggccggatcaaggtcgagtttgtccaggatggcgtcgacaagcggccagcgaggcgcgagaagcgggcccgtgacgatgggagcgggctcgcgtcgacctcggcggcctccgccgagaccgttgtccccaagggcgcatcgaagcggctcaagcactcgtctgccctgcccacgacgagcgccaacgcccagccgctcagtgccgacgccggcaagaagcgcaaccggtccgagcagcagaaggacgagtttctcgagctgttctcgacgaagcgcgcctcggctgccgactcgggcgctcggacgtgggaggacactgcgcccgaggtcgacatgcccgctgtcgccgaggacgaggctggagctgaggacgaggcgccgacagccggcggagaggaggaggagatggacgacgagacttgggcgcgcaagttcatgacgtcgactcttgaagagccggcggctaagaagacggtccaggtcgtcgaggccggctcggcatcgagacccgaaggtgccgacattgagcaggacgtgcgtaccctttcatttggcgctgtgtcgaccttgcgctgaccttgcccgcatcccactcgatagccgaaggagacgatcctcgagaccggccgactcttcctccgcaacctggccttctcatgctcggacgccgacctccggtcgcttatgacgccctttggcccgctcgcctcgagccatcttccgctctcgcagacgcacaagccgctcgggacggcctacgtctcgtttgcgagcgcgccccacgcgctggccgcgtacgaggcgctcgacggcaaggccttccagggccggctgctccacatcctgcctggtcgtgctcggccgggccagaaggagggcgctggcgaggcgctcggcttcaaggataagcaggagcagaagaagaaggacacggctggcgccatgggcaacggccgcgagtgggagtggagctggctttttatgaacgtgaggctcgagctcctccggtaccgtccggtcgagagcatggactgacacatctctctccttgctcttagtccgacgccgtcgtctcgtcggtcgccgaccggatgaagatcgacaaggccgacattctcggcgccgacagtgcgaatgcggccgtcaagctcgccctcgccgagacgcacgtcatccaggagacaaaggactaccttcagtcggagggcgtcgacctgacgctgccgtcttcgacgcctcgctcgccgacgacgctcctcatcaagaacatcccctacgcgaccggctcggccgcgctcgcggcgatgctcgagccttttggcgaggtcgctcgcctgcttgtcccgccctcggggacgatcgcgctcgtggagttcaaggacgagcgcgaggcgcgcgaggcctggaagggcctgagctataagcgcgtcggcaacagcgtcctctacctcgagaaggggcccaagggtctctggaacggcgaggttgttgagaagaaggcggccgagccggcagcagcggccgctgccctgccatcgacggtcgacctgccggcttcctccgccaagaaggccataaaggctgcatcgacggttgcagtggccaaggcggccgacacggaagacgtcccgccgaatgcgacgcttttcatcaagaacctttcgtttgcgacgacgcccgccggcctgctctcgctcttctcgcctctcccgggctttgccttctgccggatccagaccaagccccaggcgacggcgacaaacccgacgcagcgcgtgtcgatgggcttcggctttgccggattcaagacgcccgcccaggccgaggcggcgatgaaggtcgcgcagggcaaggtcatcgacggccgggcgctcgaaattggttttgcgaagcgcaacaccgaggacgtcgaggtcggtccggcggccgacaagaaaggcggcaagaagggctggatggaaacgacgaccaagatggtcgtcaagaacctgccctttgaggcgagcaaaaaggacgttcaggagctctttgggtgcgtgcctttctatccgtcgtctttctgctctagcgttccgtctgacgtctcgcgcctcccgcttcagctcgttcgcgccgctcaagtcggtccggctgccaaagaagttcaatgccggctcgcgtggtttcgccttcctcgactttcacacccggcgcgaggccgagtcggtcatggcctcactcaagcacacgcatctcctcggccgacatctcgtgctcgagtgggcaaaggagggcgaggatgtcgacaagctccgagagcaggcgggcgacgtcgttcgcgccggcgaggagggcgcgggcgagaagcgtggcaagcggacaaagattgtgctctagactggcttctatccatgccattgatcgtctcgaagaagggctgtcagaatttcagagaatgtggcgggcgcaaggactcacagtcgacagccggcagccttcgcggtcggcgcgagcgtccgcgcatccgtcccctgcccccaccacccatcgccgcctctcaccatcccattccaagcctctctcgcactcatgcgctcttcccttgcaagcagctcacgtctccgcgtcctagcctcgtgctcttgcccggcggtccctccggtgcccttccggtcggcccccgccctcctcactgcctcccggcggagcaggccgacctcgaccgtctcctcgtcccggccgctcgccagcctctcgtcgcggaccttctcttcgaccggcgcagcataccgcgccccgctgcctcatcgagctaggcctgctgcctccccctcggtcgagcggtcgctcccgccgcacctcgcccagcatagcggcagcgagcacgacctcctgcttccccctccagcggcccttaagccgctccgaagcgagggctccgactcaaagcggagccggctagcctcgtcatccgctaccgccaaaacaggcgtccggcggtcattaccctcctcgaacgcgatcccgacggccgagtcgcttgccggcctgatcgaagcccacaagccgaccggcccgctcaagaacggcctcatcccccgccggctcgtcgtctgccccatcgtcccgccctcgcccaggcccgggccggcgctgacggtcgcggagctcgttgagcgagacgacgtcaagtcgttgctggcggcagagacgcacgacctcgtcctcgtcaaggtcggctcgacgctcgtcgctccgccaggggcgagcctagccgacctttcgatcggcaagctgtcgatcgtccgtcttcaggatcgagcggcgatggaggcagccgccgccgccgcagcagcggcagcggccgaagctgccgaggcggtcagccctggcgggagcaaggccaagacgacgcgtgcccaggcagcgctcggccggacctccaacctccggaacgatggcatcgcccaagagcttatcgtctcgtgggtgtcgtcctcgaacgacattgcaaccaagctcgcccaggcccgcgagtacctgacgacggcccacagggtgacggttgtttaccagccgaagcgcaagggcggaaggagggatccggtcccgccgcacgacatccaacgcgagatgctcgaaagcgcagcggtcgagctggcagatatcgccgagcgctcggccaacgacaagtttgacaagggccggaacgctgccttcctgtgcgttttgtttgtttcccgctcactctttccccttcttgtgcttctctccctgagcggatcggcgagacctgaaccccccccccccacacggttaccgcgctctctacaatccagacacctcgagccgacgcccaaggtccgagcggcctaccgcaagcttgccgaggccaaagacgccgaaatgacctcgatcaaggctgacgagctccgcaagaaggacgagaagcggctccgggcggcggcaaagcgcgaggaggacgcccgcgtcaaagaggagcatcgcaagtttttcgaaagtctctcatgatgattgatctctcgaattgcgccggggggagagggttggggcaggccgaccagattcggaggagctcaaagcctggattgctcgtcagtctgtccccgtcgctcactcgctctgggtctgatacgtgatcgaaagaggctgacctcccgttcttgttggaccgctcaggacgcctccggtcgagagacgcctcgatcgcagacggaagcgacagcgcaatgccggggctttccagcgggaagcgcaaggcctggctagagaatgagactggtgcgtccttggtcctccttgcagaaggtcctcttacatgcgtttacgccagacgtgctgagcgaccggtctttgacgcgctatccatctctgcctcgctcagccttccttagcgaagctttcgcacccgagcgccggccgaaagtcttgggcggcttcgctgtcttccgacgacaggtcggctgcaagcgcgatccaagcctgcccgcttcccattgaatcgccgatctgaatcggcggctcgcggccgcctggcggacgctctcggacgaagagagaaaggtaaagctgccttcctggccctgtcactgcgccacactgactcggtcgcctcgccgaccttgcagacctacgacgagctcggaaagaagtcggccgatgaccacgataatcaactgcgcgacatcaaggccacctgcacccacttcgaatggcggcagctcaaaaccttccagtccttggaagatttggggctcaccgaggaggatccgcttcctgcgcttcagctgcttccgcgcggctttcgccgccccttccgcattaaaaccaacgactggcgcaacattgacccacagctcctcaagatacaggccaatagcgtccgaccctggattgcgttccgcgcagaatggcgggcgagccatccaccggccaatctcggcagaaaggacgccgcgtggcgcgacgcaacgcaaaaggaggccggtgccgcctggcaggtgaaggtggccgcagagaaggcggtcaagaccgaggtcgaccctgccgaagtcgcggaggccaaagccaggaccgcggccatttctgcagctaactatcgttcactgtgaaagccctcgccgaggccgcgacagcccgccgcccgcgacgttgcttggcctcaacgtcatccaaccggccggaatgagcaactacatgcatctcgtctccgcttttgagatggcccgcggcaagaaggcgtgcatcatctatttcgacgaggtcgacgcgattggcggcgcgcaattcgacgacggagcgggcggcgataacgaggttcagcggacgatgctcgagctcatcaaccagctcgacggctttgacgcccgccgcaatgaggccgacccgctcgcccaacccggccttcctcagcagatcggccttttcgcgtccggactgaggccggcctcactaggccgccgaccaggcacccagcccagcctttcgtcgtccgtctgagcggcatcgtccgcactagcatgcgatgtcgcgttgagctcgacgccgtcggtcccagctcgacgactgggccatcaagttgcctcagcagcgcgaccgcagctctccacctgtcccccctctcccccgccctgggcgttgcaggtcgaggcgaggctggtgagtgtagacaatattgaggccagcgtcggccataataagcaggcctcgccaggggaagcagcgactcagaggaacaggcctcgacgcctggattgatgtccttcactagacgtgctgcgagcgccattctcatctcagccctgccaaggtcttacacgctcaaggcaccttgcttcgcccgatctctctgtacgaccatggccggccgaagtgctgggtgaccgacaaagccagccgaccgagcgcgttcggcgccgctccagcccgcaaggcacgtcgctcgtcgccgagcgtgcggagattccggctctcgacgagaccggtgtagtagcgcaggccatgagtggcgcctcggggcttcaggccgaggtcctggatgaggccgtcgttgtagtgctgcgagaggaggccgagagtcagtcagagtcggcagcgaggggctcaagagtgagcaagcgcacctgggcattgaggaaagggactgtcgtgttggtcgtccatggctgactcgacagcgggaagcgatgccgaagccactcggcgtggtcttcggcctcctgccaggccgccttggccgaggacgggagccggaggtgtggcgagcaagcaaagaagtcggagatccagtgagccgtaatttcggacgagtagggcgcgccgagaagggctgcgaagccgttcatgcagaggtcgcgctcgtcccaggcgcctgttgggacaatccccttgtagatgtgacttgctggctggcgtgagggcggcgcaggcggatcggcaagcgtcttgtagccgtcgaccggggagcgtgtatgggcaagcctttgcggcccagcgggctcaatccccaactgaatgcgttcctcgagagctgcgttcgaacaacaacgcagtatcagcattctgccgcatgctacaatagagattcgctgaagctgctcacgaatgaagtcccaagacgacgtgaagccggttgcagcgacaatagccccgccggccgcctctatcacggagccgtcactcaagatcagcccggagccgtcctgggtgatgccgctagggtagacgtgcgaccgaattgcgatgcgaccggcgttgacgagcgggaaaaacgcctttgagccgagcgagacgcgacctccgcctgagtctgggccgctgccaaagtgaccaaggatgggacaatcagcactatttcgggcgctcgccacagagcctgacgatgctcaccgccagatgggctcgggcgagtcgcgatagagtggcgagtcatgcgtctggccgagggcggcgagctgagggcgacaagggagcacgtcagcaaccgcttgacgcgtgcagtcagtcgcgagcagctgtgatcactgacgcgcgccttgtcgccctttctgaggtaccgtttcaagtaccacgccccgagccaggtacgatgcaggagaaagctgagcgaggccaaagtcgtcaatgtcgagtgatcggccgctcggggaagcgaaagcgcacgcactcgaggaccgtcgtcagccgctcggctgggaacagagtcgagatgatgctgtttggattggacgtagaggttagcaacgtggtcgattagcaaagaggcagggtaccagacgcaccgcgtcttgatgaggtagtcagccttggatgtcgccgtctgcgggctgaagaacttgggctggttgaaggtcatcgtcacctcgcgtccctcgagcgcataccgggtcgcgaggtcaatcgcgctctacggcgaggtcaagtcgggcacgaaagcacgtgtcagcctctcgcagtctcagcagcaaacagacgcgattgtaccttgccgcagccgatgacgacgatgcggcccttggtcgcaaggatctggcggtcgacatagtcgtgcacttccgacgagtggacgaaaagtccactgaagcccgtcttgccgcgcagaggttcaggaaagttggggttactgtgcggctgcaagaggcgcagaagcagccggttagcaggcgggagggaggcagggtcgggcaccgacaagacgcacgccttgcgcgagaatgactctgtcccattgcgtctcgctctcgacatcggcctcgacgtgccgggtccgcacaagccatcctctgccagttgctggtcggttgagccggacgaccttttgcaggaaactgccggcagtccgggagtggcgtcattgtaagcagctaaagcgggtaagcagagacgagacggagtgacggcgcaccggatgtcgagcctgccctcaaggtacgtctcgaagaagtcctggaggtagtccgacacagtctcggcctttatgcggccgtccgtctctgtcaggtcgtctcgcggcatcggcgaagtcgagtattcaaagttgccccaagccgagttggtcaggagcgacgggtagatgccgccgtgggggcctctggcccagacgccgccgacgcggtcagccgacgtgacgaccgagacggcccggaagccatcgtcgagcaacgtcttggcctgaatgagcgccgacgtgccggcgccgatgatgaggattttgtttgagtacacgtccatcatgggctagtcgagagctgtggcagagggtaagtcgaacgaggtcgtggcgaggtcgggccctcgaagctcttatctcagccggtctgcttctttagagcgtcaggcaggagctgtgggcctccccctgatagtttgcgcggccggaggtgtgccgacaggacgacgaggaaggcgtctttggccgggctgatgtcgccgatggcgcgagatggggcgagcttgggcctgtggtgataggcgcgcacgtccgcctgcagtatcgactccgctaggtcgcacacgaccggcgagcagggcagctgtgctcgtaggccatcagcagggggtctcttgaagacggatccctcagaaaggtcgagggctactggccgttgctgcgcgaactcgctgccagatcggtcgtccatcggcatcacgtcccttctctcgcaaccgtcactcgccctcgaccaaagttggatgctcccctcgctcctgcgctcgattcgacctacctccctgctctctgccatcgcccgtccagcagccctccttcaccgcccaatgtcgtcctcgctcgagtttacgccggagcgcgccgaagagctccggcacaacttcgagagcgtccagaacgaggtcaaggaggccagcacgaacgtgagtcctggagtgatccgcagctgaagaggttgcaacactaacgctctgcttttgctttccgcttctaggcccaacttgtcgccgtgtccaaggtgcgggtcgtcgacgctcagcctccctcggccgcctccgagctgacctctcgtgccggccccgcatgaccgaccgcttgcagctcaagccgtcgtccgacatcatggcgctctacgaggccggctaccgacactttggcgagaactacattcaagagctgtctgacaaggccaaagaggtacgtcgatctcggcttgaaggaggcaggcgaccgcggctcatgccgcgatgacccctcttctcattgcgagcgcagctgccgaccgacatcgagtggcacttcatcggcaatctgcagagcaacaaggtcaagctcgcaactggtgcgtcatcctgtcctgcgcgttgttgcgtctgccagatggaggactgacctggctccgattcttgaacgtccagcgatccccaacctgttcgtgctcgagacgctcgactcgatcaagaaggccgacatgattaacaagcagctcgaggcccatggccgcgaacagccgctcaacgtctacattcagctgaacacgagcggcgaggacaacaaggccggtctgacgcccccgaaggacgatgagggcgacaagggtgaagcggtcgcgctcgcgcttcacatcgtccaggagtgcccgcacgtccgcctgctcgggctcatgacaattggctcgtttgagcattcgcacgccgagggcacgcgcaaccccgactttgtcgcgctcgtcgaggcgcgcgagaagctcgtggccgcgctcaagaaggcgggcgtcgagagcgggaaggttggcagggagggcgagcaatggcgtctcgagctcagcatgggtatgagcgccgactttgcagaggccctcaaggagggcagcgacagcgtccgggttggcacgaggtgtgttcctcaagagtcttgcggagcagaccgatccggctgaccactctctccgtctccctcgctcatcgtctgtgcaggatctttggcgagcgcccgccacgaggatctgcttgatgcgatgccccgtgcgcagaatagacggaatctcggcgcattagatcaggcgagaatgggcagggacgatcgtcgcgcccgaaaggtcacactatggacagggagaaggagaaggtatggaacagaaattaagaggcatacagtcgagagcgaacgggacaaagcggtcaggagagcaggcgaggggaagactcgagccttcagcggaagacgatgtcgatcttgccggtcccagcgaaggcgccagcgaagccgtagcccggcggaggcgggcccatggggtggtgaggcgggccgtgaggccggtggcacggcgacggcggcggcgggtggtgcgggtgcttgtggtgcccgccctcgtccttgtcgtcatgatcgtgcttgcggtgccgtctctccggccggcggtcgtcgtcgtcctcctcctcgccgtcgttggcgggccggacgtgcttctggcggtgccggccgagccgggcctcctcgtcgtgccggaaggggtaaagctcagcctcgaccgcagcgtcgtcgtcggtcggcttcttgggctccttgggatgcttggggtgcttgtcatcgtcatggtggtggtgcttgtggtggtggtcatggtggtccttcggccgctcgccaacaaagcccttgacgaagccgcccggtcccacgtgcttctccttgtcgatgacgatcttgctcccgccggggttcgcaaactcaacctcgccgatgcgcgcgccctcggcaaagacgcccttgaagccagggaggacagagagggcgacgtcgccgatctcggccttggcgaccgccaggagtgacgtcttgttcgagggcaggtggtcgtcgacgaacgttagggcgaccgagccgatgccggccttggcgaggactttgattaggtgcttcggccggtggtgcggcggcggcggaggcgggtgcgggtgcgggccgtcgtgcggcggatggtgcggcttctctttgcgggcttcgatcgacgcggacgaggacgagccttcggccgccatctcgacctgctcggccaccgaggccgtatcgttgtgcttgccgtgcttgtggtggcggtggtgatccgggttctcgaagatcgagacgttagcctcgatgccaccgacgagcgttgccagggtgagctcgccgctgacgttgaacgagcccttgatcgcgcccgaggtgagctgaatcgcggcctcgtgggcatgaaggttctgcgaggaaagcaatcgttaggtcggcgctctttaacttgagaatcacaagaccgagcagacggaccttgacgacggcgtcctcgccggtggacgcggcgagctcgaatcggccgatattgaggccggcaaagtcgagcgcgccgtcggcgagcgtcagccggtctccctggagcgtgaggtcgatcggcctgccggcgcagccagacggaaggatgacagtgacgagataacggccgcagttgtgctgcggaaaggagaaggagaaagggttagcaggttcggtcgaggagtcgactgcgcgcggcctgcgccgaagcttcactgcgggcgcaggcggcttcagagaagaggagaacacgcacaatcacgacgccggcgagtccagaggcatccttctcgtagttgtacttgcggtgcttgtggcgcgcctcggaaagttcgccgctgaggacgcgaacggcatcctggcggacctcaccgtcaagcgactcgatggtgacgcggccgatcgacgcctcgcccgacgccgacgcggcgtgaacgagcgcgacctcggcatggacgtcaggcccgagagcgacgacgacgtggcgcgcgcccttgacgagcgaaacgtcagcgacagggttggccgatccgacaggggccgtcagagcgagcgagggcaggccggccgactgggcgggtggagagattaagtgggagtcagctcgaagggattggcagaggcgggtgcgaacgccttcgagcgtcccatctcccgacacctctcgagcaaagcgacgcacctgagcgagccagtcaaccttgagcgcacgctcgtgctcgtcaaaaaagccctcaaagccgtgccggtcggcccagcggctgccgcggccgtggcggaccatcccccagccttcgcggacctcgccccaggcgccgccaccgggcgggccttcgcacgagagcaggttgaacgcgaggaggccgagcgtgatgctgcccacggcggcgacgaagatcttgcgggcggtgctcgggtggtgcgaggcgggtggagcgggagtcggcctcggcgtcgagggccgcttgatgtcggtcgtcgggagaaacgagtccttctcggacgggccgtcgtctgtcgggagacggacaggcatggcttctggttttggtagggtagtgggtggttggaggttgagggcaaaggacagagtgcgacgccctttatggatcgaggtcggtcgaagggggatggaggcgggaggcgactgcgggcgcggccgggcgtaacagccagttacgctccagcgtcgcgcgtaacgcagggaatttgggccgcgctctctggctgcgcagcttctcgacgagctcgtccccggcctcgacgacaccctgaccccttcaaccctttccacagccatgcctccctctacgaccggagcgcccaaggcggccaagaagctcgcaggcaagaagaaggcctcgtggcgcaaggcgatcgacatcaccgacatcacgaccggcctcgacgaggtccgggccgaggagcgccaggtcgggtgcgtgctctctcgtgctcaggcccgagcgctcgatgagggtctgcgaagactgacgctctttctctcggctctgcagctcgtcgattgcggcgcagacgaatgatcagctcttcatagttgacattgacggcgacgcggacggtctgtcttctcccacgcacgcccgcgcgaccggagcgacgagctgaaccaaccccctcccgcagtgcccaggccgaaggcgcccaagaagccgcttcggtcagcccaaattctcgccgagcggacattgcacccggccgtctactcgcgcccggccgtcaacgctcggccggcgcacaagcgcatcctgacgcacgccgagaaggaccggctccggcggatcgccggccgcgacgtccagggcccgttcaactctaccgtcgagcaggctggcaagtggggcgaagggtcggccgtcttcgcgctgccaaaggggagcgaggagtacgatgcctggcggcaggagcggatcgagcagggcgagtgggacgccgggcgcgagtgggtcaagaaggacgtcaagctgcccaagtcgatcgtcaagggcatggcgctccggccggcgctaccagcagtgactcttcctgcctcggggcagtcgtacaacccgacggctgaggctcacgccgagctcattgcgctcgccgtcgccgaggaggagcgccgtgttcagctcgaggctgagggccgtgacatcaaggaccggatgatgtcggcccgcttcgacccgcgcgagggcgagcggtttgtcaacggcatgccggtcgatgtcccggcagagggctccgacgaagaggatgcggccgaggctgagctgagcgagggcgagagcctcagctggaaggacgagcgcaaggtggcggcgtccaagagcaagaaggagcacgccaagaagtcgaaggcccggcaggccgaggtgcgtttgaccagcttgcacgaccctgctggctctctgtactgactcccgtcgtcccgtcactttgctctgcaggctgagcgccaggcccgacagaagctcgccaaggtgcacgcccgcgagttcggcgtcatcagccagacgcgcaaaacgctcgacaagacgacctcgctccgggccaagctgcttgccgacaaagctgcgcgcaagcaggccaaggtcctcgccggcctgcgcgggcagaaggtcggcgggcacgaggtcctccgcggcggcgacatggacgtccagctcggcgaggagctgagcgagagctggcgccagctcgagcccgagggcaacctcttccgcgaccggtttgcctcgcttcagcaccgggcgctggtcgagccccgcaaggcccagacgggcaagcgcaagctcaacaagcacaagagctacgagaagcaccgttcgtccctgatccccttttgtctggccgagcggcactcgacttgctctcgctgacaccagtcttcgctgctctatccagcttggaagcgattcgagtagcttcgctctgctctcgattcgttctccttctctggctgtcctcttgcattctctctctctacatgattgcttggggctgcgacactgtccaaagtcatcgtctgtaagaaggcgacccagtgccccgctcctgtccgcacgccaccctcactggtggccgagcacgacgcccttgtcgcgcgtagcagcagcagccaggtccatctcgtaccggacgctcgcgagcgcccagctctcggccccgacccggttgccgcccatcgcctggacttggctgaagggccctctttgcgtcgccgggtcgaggttgcggccggcgagcgaggggtcgaagggagcaaaggacggcgtagctgagatgcgttcgaagctcgccgtcgtcggctgggtagtcgtgtgaactgggaccagcaagagggtcagcgtgcagacttcgtacgcaggcgaatctctcagcgtctgacgcaccttgcgggatgtgcgtctcgggctcatagacgccgagcggcgggcccacccggcggacccgcttgaccggccgcgtcgccggatccgggcccgggaagccgctctcaaacgcagcagtcggtcccgccagcgccggctgaacgctctgggcccgcgagggaaagccgtcggtcgtcggcgtcagagtcgacgcgatcgagggctcgcgacccttgcccttgagcgaggcgaccgctgtcggctgctgctgctgctcgtccccgccggcgacaggctcagccttggcggcaacgatagcgccgagggctgcaaaagggacaggtgcaggcgcctcgatgccgtcccacatgaagcccttgcggatctcctcgagccggtcgcggcgctggcggcccatctcgctgttcttctcgctcgcctcgctcgcaaagcgcgcgagccagttcacctggctgaagccggccttggtgagcgtgagccgcttggcaaagccctttgcctcggtgaatgggtcgaggccgttcgaggggaaatgggtcgtcggtccgccgggcgtgtagaacggctggttggccggcacgcggtgcgaggccatggctgcctgcgagaggttgaggttgcgcgactcgacgagcgaggctgggtcaggcagctcgccaaccaagctgccgggctcgatgccctcctcgcggcacttctccttggccgggccctcgtagtagtcgtccgtgacgtgcttgccatctgtcgtccgatgggaaagtcagcctcacgctgcgaaatgagagcgacgaggacgacacggacccttgatcatcttggcgccctgcagcttgaacgcgttgcggacggcaatcatcgtcacgctccgcgccttgaacgtgccgttgagccgccggtcgcggatgaggatgtccttctccttattggcgagcgagagcttgacgagctccttgttgcgccggaagaagtagagcgagtcgcggtagccgcacgtccgggccgcgtcgatcgagagcactgtcgacgccgagcggaggttgtcagccgacggacggtcatggctaccgaggcgaaagcagtgcggagcgcactgtagaccttctccgggtcggccctgtacgggctcgtaaacgtccgggccttgaactcgcgcccaccgaggaggttgcccttggcgtcgatcttgaggttgccggcgtcgtcctcgggcagctgaagctcgtcgtactggaaaatgtactctttcttgtcgaccatcatcgtcgagggcgtcgatgagtcctaaatatgacgggactgtcagcagagaggccgaagaatgaaggctcaaaggacgtacggggtcgtcgagggcggcaccgtcggtcggcacgcgccggagctcagagatgcgagggttgtacgagaggaccttctgccggcctcggccccgaccacgacctgagcctctcggccggccgcgcggtcgacctcggcctcgaggtgtgctcgtcgagggctgatcaggcggaagacatgtatggccaggatagcaggcaaggcgagaggaggacaggcaggaggaggttcaagcggcgcgtcagctcaatgcattcaagaccgctactctctttgagatccgcaggcaacgcacagcattgaagtcgtcgccgtcgtcttcgctcgggtctccctggtcgctcgtcccgccgccggcgccagcgcccgtgccgtccgtgtcgtcgtcgccgtcggtcgcgagcgcgctctggctcacgctcgcggcgagccggccgcgggtccggcgcatcgggcggggctcggcttcgatcaccgagccatccgagccggggttgggcgagtccatgcggagctgctgtatgcgaggagagcaggtgggctgctgggagggtctaaggagcgggtcgtcgtctggagagcgagaccggttcaagctgaggtgaggaagcgacgacgcgctgctgcaacgcccgcccgcccgcacgcgcgcgcgagaggcggccgcaggagatttcgacctcgaagccgcaccgttcggcttcgaccttcgacctgctcgaccactctcttctcccacagatcacagctgctcagggaggtcgcatcgcttggcatgtcgtcctcgctcgagtcgaaggtccacaagtatgccatgaccctgccgaagcaggtccgttgccctcccgcgtcccgctcctccgcgcctcccgcttacttgtgacacgtcctgatccgcactcgtccttttctctgccttgccgctcgtagatggtcgggcaggcggaccttcagagccagtttcccaacacggctttgaccgacattggacttgctatcaacaatttgagcaagaaggtgcgcgctcctctctacgtgctcgtgcgcgcctcccggcactcgggtcgcaaggagggaaccacttctcagagccagacgagctgacacgacctcatccaccgctctcgtggggcagaaccttgtcgtgacgatggacctcggagccaagggcatcaagtggaaggccgtcagcaagagcgaggcgaagaagtgcgtggcgcgagctcgaccggagaggcgcctgcgcggacgctcttgatgtccagaagggaggatactgacgatccattctccgctgccctccttcctcatcaggatggcgtcgctcgacgacgaagagggcctcgtctatcgtgtcattgagcaggctggccgggatggtacgtcgctgtcttggccgagactcccgaaaggagctgcgctgactggttcgaaccccctggtgccatgccatgctcagcaatctggacgatgcacatccggtcgcagaccaatctgcaccaaacggtcgtcaacaaggtgctcaaggcgctcgagggccggaatgagatcaaggtcgtcaagtcgatcaaagtgcgcctccgctaccttgtcgttcgtgcggctgcgcgctctccccccgctgacgcctaccgctcggatagttccccactcgcaagctgtacatgctcttccacctgacgccgagtgtcgagatgacaggcgggccctggttcaccgaccacgagctcgacaccgagttcatcaagcagctcctcggcgccatcctctcgttcatcaagcagcgggtgcggtcgaacgcgcccacgctcgcagcgaacccattgctaaccccacagttccctcgcttcgcactccttttgcagtcgttccccaaggtcaaaaactatccctcggccgtctttccgccgagccacgtctcggcctacccgacagcctcgcagatcgcgacgtggatccgcaaggcgcagatttcgacgaccgaactcaacgtcggccacgtccgggtcctactcgacgtgctcgagtttgatggtgagatccaggccctgccggccggcggctcgagcggcatggccgacacgtggcggcgcggcggtggtggcggccggggcgagggttcgtcctcagcggcatccgacaaggccaagaagagcaaggcgcgcaaggccaaggactcagagtcgtcggatgcgagcgaggacgacgaggcggaggcgcggcgcgcgcggcggcgcaagaaggccaaggcgcaaaaggtcgagaaggagcgccggcgcaaggccgagaaggagaagcgccggcggaaggagaaggagcggcgcaagaagcgcaagggcagcgacgacggcagcggcgactccggcagcggctcggaaagcgcaagctcggacgcgagcgcgagctcggacgacgaccggcggagtagcaaattaaagtgcgtgccaccgtggtttgacactggttagggcggattcgctgactctcgacgtcttaacccgcagatccaagtcgaagcgctcttcgttcaagtcgcggtccaagaagcggcgcgccgcgtccgacagcggcacgtcgtcgtccgactcggactcagatccttccgacgcgctcgagcacgactcggacgactcgtccgacgactcggccgcgcgggcaaagaaggctcggcgagcgaagaaggccaaggcagcggcggccgcctcgcgctcgcgctcgcggtcaaagtcgcgcggcaagggcagcgatgatgacggcgatgggaagagcgacggctcgctgccgtcggacgccgactcgatcgaccgcgacatggctgcacgcaaggagaagaaggcgaagcgggtcgaggtctcgctcgagtcgtccgacaacaagaccgaccgcaagtcgtcaaagtcgaagcgcaagggcaaggagtcagagagcgagcccgaggagcggcccgacctggccgactttgaggacgaggagggcgacgcactcgtctaccgcgctggtccgttccatcgcattaccctttcctcgcggagcgctccgctgaccgcccgcctgctcctgttcgctcacagtacggccagaaaaggtcgacctcggctggacggccgcgccctgcggccggtgcccggcgtttgacatctgctcgccctcggggccgatcaacccggacggctgcacctactattcgacctggctcgaccagaactttggctgagggcgcgagcgggaccggttcggttgggcttgcgaagccgtcacctgccttccctatgcatatctcttccttttcttgcgacaggatcgtccatagaaggaaggtcgctgcgcaggaggaggtatgttgagcgaggagctgccgacacccacgctcacgtcgccgccaacccgtccgacagacagacctgttcagcccattcgctgcgggcgagcgccttctgcgaccagggtcggctgcagatgaggtccctggcgaggccttatcgatccggcttgtttgcgtgctcggccagaaggttcggaagtgtgctcccgtcgcgccgtcgttaagtccgcgccgcgtcttcgcctccgcctcgctgcacctctgaccgtcgtgaccatctcgccgcctcccactttcttccataaaaaaaaagggtccctacgtcctcagacctcgacgaacactatggctggctccacgctccctgtcagtgtcatcaaggccgcggccgaagcctacccgaagccgacagccgactacgcctacggcacggctggcttccgaacaaagtgcgtctcgtagtcttgtcgccagagcagtgtccttgctgctccggaatctcagctggcgctacctagcaggcatccagcgttgctgccggactcagcactgacatgggcgcccgctccttcgcagagccgacgtcctcccctgcgccctcttccggatcgcgctcctggccgtcttgcggtcgcagaagctgcacggcaagacgattggcatcatgatcacggcctcgcacaaccctgcggccgacaacggcgtcaagctgattgacccccggggcgagatgctcgaggcttcgtgggaggggcattcgacgcgcgtctgcaacgcccgcgacccgaccgagctcgtcggcgtcctccagaagctcgtcgagacgcttcagatcgacacgaccgtcaagccgcgagtcatctttggccgcgacacccggccgtccggtgagggtcttgcgctcgccgtctcgcgcggtcttgcggccatcggcctcgacgagggcgccatcggtctcggcaagggcgagcagccggggacatgcgacaagggcatcgtcacgaccccgatcctccactacctcgttcgagccgaaaacacccagggtaagggcgagctcgaggaatatggcgtgccgaccgtccagggctactacgacaagatggcagcggccttccgcaagctgacggtcggtccccctcgccttcttttcaagcgtggcctgctgcgcggcgctgacgaccgtgtgcgcccggtgacaaccttgcaggactcgaaagcgcccttccccaagccgctaaaggtcgactgtgccaacggcgtcggcgcgcctatcctcgccgagtttgcaaaggtgctgtcgtcggcctcgaccggctcggcccggccgccgccgctcgtgctcgtgcccgtctcgacggcgatcgacgacccggccgcgctcaatgcccactcgggcgccgactacgtcaaaacgggtcagaagctgccgcctgtcttcctgccgccgtccgagcacgcactcgggtcgggcacgctcgcctgctcgtttgatggcgacgccgaccgcatcatcttctactaccttgaccaaagcgggacctttaagctgctcgacggcgacaagcaggccgcgctgtcggccggcttcctcgtcgatctcgtccagcaggctgggctcaacagccgggatgagggcgagggcaacgtcgacgttggtgtcgttcagacggcctacgcgaacggcagctcgacgcgttacctgcgcgaggtgcgactcagccgctacagccatgagtcgcagccgttcccttttgctgacgtcttgctgtgcctttcgacctgcagcgcctgcctgtcgcttgcgtgccgaccggcgtcaagcacctccatcacgccgccgagcggtacgacatcggcgtctacttcgaggccaacggccacggcaccgtcctcttctcgccggcctttgtcaagatgttgtcgacctaccagccgcggacgccggcccagaagacggcgctcgcccacctgacgcagtttacgcggctcatcaaccagacggtcggcgactcgctctctgacctcctgctcgttgcaacgatcctcatccaccgcggatgggggccggccgagtgggacgcctcgtactttgacctgccgaaccggctcgtcaaggtgctcgtccgcgatcgcaacgcctttacgacgaccgacgccgagcgcaagctcgtcacgcccgtcggcgcccaggcgctcatcgacgaggaggtcaagaagtacgaaggcggccgggcgtttgtccggccgagcgggacggaggactgcgtccgcgtctatgctgaggctgcgagcaagtcgcatgtcgaaggtcaggctgcgcaaagctcgttgcgtctcgcacaccctcgcacaccctcgctgacccagccgctccctctctttgcgtgcagagctggctcttcgcgttgcgcagatcgtcgaggacgccgcatgatggccttctttgacgacactccctctgtatcccatagctctgaatactgcaaggatcgagggtgtggatcgcgcggcgtcataagagagcgtgacccgcccggccttcctacatcttgacccgcttccgcgccggcgccgagccatcggcggaaggcttcgggcccgacgagccaaagccaaggccccgaggacgagccttcttttccttgccggcgtcctttttgcgcttcttctcgagcgccttcttgacggcgaactggccgccgcgctcgagcagggccgcgtgcttagcctcgacgagcaggcgcttcttctcagctggagaacggaggggccaggcgatctttcagtcagcccgggcgaccgcgaaaagtgaaggtgcagagcgaggagagacgcacagtccttcatgtgccactggcccttgccctctgcctgcttcttcttctcctcgtgtttccacgactgcatcgcctcgcgttcgcgccgcgtccgctcgtcgagctccttcttcgttcgcaaacgggcaagctcacgctcggcgtactcgacgtcggcctcgcgctcctcacgcagggcccgcggggcgttgcggagcgccttctgggccgccttgagcgcatcctgcccggcgacgtactcgttggcgacgaggttcgagaggaagccgtacgacttggcgtgcaggtgagcgtcgaccgtgccggagagggacgagaaacgagggtctcgtcgctcctgcagaccgaacgaaggggctgtcagcagggccgctcaccttcaaacagatgcccggaggccagaggaagacgcacgatcttctcaacctcaacgaccgtccgtttgcgagagactggtttcttcgaagtcacctcggtcggtctgcaaaacgaaagcacagagggtcgtcctgatcagcttgaggcagcgtgacctagtgagcccacggagcaaacgcacgcatgcttgtcggcgcgcttgaccttctctcgtcgctcccgctcttgacgtacttccctcggctcctcctgctgagcctcggcagggagacccttcttcttgcgcatcatctcggccagccgctcgcgggcggcggcaatcttctcggcccgctccgggtcgtcgccatcggtgacggaggcgctcgacgagccctgggccatcgtccgcttggccttcatgatagcagagattggaagggagcacatctctgaggagagattggagagtgggagtcagccctctagttgtaagtcagtaggcttgaagaggcgactcaccctcctggatgcgagcctgcggtagaacgtggtcgaatagtcagcccacctcgaacaggcagctcgaaagctagaatgacactcaccatctctcgatcccggcccttgcccttcgcgctggccgacaggcgaggtgcttcatccccgtcgtcgttgtcgtcgtcgtcctcctcctcgtcttcgtcgagctcgctcgcctcgccgccgtcgacgctcgagccgtcatactcgccctcgtcgtcctcccacatggcgacgcccgtcgtccgctggcggtcctcctcaaactcatcctcctcgtcgtcttcaagctcgggtagctcggcgccgccctcactgtcatcgtcgtcgtcgtcgccggcggagctctcgtcgtcgaagtcgggcgcggtaggcggagcagcgggtgcagccttcggcgccttccgctcgccctttgactgagcggtcttggccgagcgcgacggcccagcgttggagccaggagcagggcgcatgacgtcgaatcggcttgattgtgaggtcaaaggataagaagagagtggcgggaacgagcgggtcgtcaaccgcggcgacgagggcagcctgcgctttcgagccacgaagcgatcgagaattctcgcacgcagggcacaataaagccaacgggtggccagcacaggggattgaccgtagcacgcgctgcgaccgttggctgctgtctttgttggcgccagcattctatgcaaaacctgcgtcgctgacagccaccgctgaacttgccggtgctccctcttgaggggcggacgacgcacccagcccctcgaccggcgcaacctcgtcctcgtcgacgccgagcaacgtgcggacctcctctttgccgcgcctcagtaggctcatcgggaactcgtaccggctggcctccttgtcggcaacggcgttccagacgcggtcgtacgcccgagcaagccggacgagggcgccgtgatggatgtcccgggcatgcgccgtcgacgacatgagcgagagtctgggcgacgacaagacgtcgagcgtctggaggtacgagtggaactggctgagtgccgtcgagagcgccgtcggagaggccgccggcatgcgcgagagcggcgtctgtacagagcggtggtgatcagtagagcaatccgtgtgctgcagaggattaaatctgacccacgtcggcatcctttccgttgattgcttgaatgatcggctctagaccgctctgattgaggcacgcctcgaactgcaatgcaaaggcgaggtcagcgtcggcggcgacaggttaagcgagcgtgaattgacaaacgtgggcgtcggcgatgaacttgacgtagcggtcgagcatgaggtgcaggcttgcgacgcggctcgtcgtaaagctgaaactgtcgaggacatgctgcaacggacaatagggtgaaggacggtcagctgtggtcggagcagacgacaaggcgacgcgcactagcgcacctcgagatagctaatgcagttgacgagaaagacggccttgtcccactccatgccgccctcctccgtcttggtcctacgaatgacccgcaggtcggccatccggcggcacatctcgaggagggggtcaaccgcggcgtcgaggatgcgcgaaaactcgtcctcgcgctcgcgctcggcctcgggcccgtccgagtcgagaagcgacgactcgtagacggaaaggatcgagcgcagcgtcacagtcgagtcgagcagggcttgcggcggggagaggtctgcgtctggcggctgagataggaggatgggcagccggtcgttgaggtcagctgccgggaagggcgaagcgagtccagggcgcacgcacatgcaggaagcgaagtagagagcggccgacagcgtcaagcgtgtcgaagaaggtcttgtacgagaccgtccagatccttcagcgatgagacgcggggtcatcagtctgcgagcgcctacggaaagagtgcgacagcggaggatggcctcactcgtgcagcgtcttggccagcagcgcgtcctcgccgagcgtgcgcttcatcgtcagcaggtagaactgcagcaggttgacgactttgtaggccgtgatgacgccgtcctgcgagcgaatcgtatgctggattcgtatctaacaggaagaggggtttgagcagcaaagaggtcagcattcgagcaagacgagcattgtcgaatgggacgccgcttcggccgtctcgccatctagcagggcgaagcctcaccctgagtggccggcagcaaccttccagacaccggtcaagaacctcgcgcacgagccgctccttctcgacctggtcctcgcgcgccagacgttcgcgggcaagagtcttgcggtcccggatcgtcgagccagcgccgtcggccgcgccgtcctgtccagttgtggccgccaaggcgaggcttccgacgttgcgcctgacgctgccgaccatccggccgtcgccttcgacgccaaagaagccctctaggaactctcgctctccggcgacagcctggtggacccaggcgagcatgtctccgacgtagcgctcggggtcgtgtgcgtggagctcgatcggccgtggtccaccgagcgtcaaagaggttgacggacccgagcctcgggtgagggcctccaggaaggacgagagcagagccgaggagcgcagggtcgtaagtgcgccaaggatctcgctgtatattcaagaggcgagtcatcagctttgtctaacgtccaggcgtccagttgacgagacgtacgctagcagatccggccgctcggtgcgtaagcgcccgaccgcctcgcgcaggataggtccgacctcccccccaccgccgccgtccttacccgataggccgcgaacctcgcctttgacccagcgagcgagacgctcgtaggcggcctcgagcgtccgggccgtatgacgcatgatggcctcgccggcctgggtcgtcccgtctgcgccggcctcgcttcctgcagactcgcccatggacgcgtcgccgttggcgagtgagctgccgcctccgccgaggaggagtgagcggcagtcagtccgaatcgcccggagctgatcgatcgagcggaagaagtcgggcgtgatggctgcgcttgcgccggccgacgaagtaaggaggttgatctgggcggccgggagcgtgaagcgcgagaggaagaggtcgatgagcgtcaggcggagctcggtgctcgccctgtcccattcgtaccccatcaagtgaatgtcagcactctgagcgtgatgcgaaaaagggtgcacgaggtcgagcggaggaaacgcgccgttgtgcgcgcaggccctcggcccgcgagagaagatacgacgtgccctggttggcgacggcgagctgcgcctggacgtcgtcgcaccgagcctgcatctcgttcatatgcgttcgcagttgctcgagtttctgtcaagacccggatatggcacaaagagtgggataggactgcatgtcagtcggtgatgagaacgagctgcatcggtcgacgccgggtgctcagccggggcaacccgccagctctgtgctgaccctcctaccgcagccatgcccaggtcgacaagagaaagagacgcactgagtcgacatctccgaaagcgtcgaggaaggaccgactgccttgagcaagacgctcgtcggcgtcctctctaaggaccttccgcgctcggctggcgctgccgacggaggggtcgttgccggtcgctgcgagcgcttgctgctggcgcccgtcatcagacccggaggcttctccaggcgcagcgtagtagtcggagacggtcttgagtgcctcgagcgccgacggatcgtcaaagtcggacgcgaggaccttgtagagccggagcgagatggggttgcgcgacggcgtcgacgacggccggcgcgggacggcgacggtcccatcggccggcggcgggcctgctccgattgactgggtcgacgacgacgacgacggattgcggtgggtcgcgggtcgaccgtagccgagcgatgaagtctgagccgacgccattccgagggagggacggacggctgctgaggcgaagaggtcgtggttcagggttgaagcgtcgcgtcggacgaaagagaagagcgtcgacccgaccctggccgcctgctcctcgccgaccatcacccgctctcctgccttctcgccagagagactttctcgtctcagagcatggcgcagccctcactgatccaggctattggttcgtctggctgtggctgctctgttgccgtccgtagaagctgaccagctgcctgtggcgtgcaggttactcgtcgtcctcgtgcggctactgctcgccaccaggccagcgctcaggcaagaaggagagctcgagctatggattctggtgcgtagtgatactcaagcatgctcagtgctcgactgctagctgacggcgcagaccttggcccgtgaacagggcccaccagatgtcggtcgaggtatgttgggctgctgcgtgcgctcaggcatccttctgacgctgccaatgatgctccgacccgctgcagctctatgactggctcatcaatcgcggctggcgacggtctgggaaatacgtgtaccagtgcgtatcgctcgtgcgggtggctgcgtcagtgtatcgagactgaccagatctcgtcgcctgcgcagccccgacgtgcgtcactctatcctcagtcgccgaacgtacgcggcacgctcacccttctctccttcccgccttgcagatggcccggacctgctgcccgcagtacacgatcaggctcgaggcttcgcgctttgaagcgaccaagaagcagaagcgggcgctcaacagctttgaccggctcctcttgaccggcgccgaggcgtggggctcgggccggtgcgtcgcctgcgctcagtgtgtcacagtcagcgattgtccctgatcgaccttcaactgcagaccacacgcccaagtgtcacccgcaaagccaggcaagggcaagtacaacgcgcccttcgaccttggccgacagatccacctggccgaagagcgggtcgccctggcgacgccgtcaccctttccgcccctcccgccgccttccgcgccgcccaccgttgagccagtgcacaaactcaaggtcggtcgccccctttgactgatctagacttgcttcgggattccagctgaggtctcgcattgtcgcaggtctcgtttcacccgtcgagcccgccgcaccctgccgtgcactcgatctaccagcgctaccaggccgcgatccacaaggacccaaaggccaacgcgcccgacagctttgcctcgttctcgcgcttcctctgcgactcgccgctctcgatggacgacattccgtacccaggcgcgccgtcaggcaagtcggctcgccagacctggctcgacgacaagggcctaccaggcatgtggggcagctggcatcaaatttacgaggtgggccacatcattcttgcagtgctttgcagatcgctgaaggctgacgcgacggtgtgacgcaggtcgacgggcaggtcgtcgcctttggcgttcttgacatcgtcccgaccggcgtctcgtcggtctacttctgctacgatcctgctagtccgctctcgagtgacgtcaagtggggcaaggtctgtctgatgttcgctaggcgcgaccaagacgtcttcgctgactcgtccttgccctgctggtctgccagatcagcgctcttcgtgaaatcgcccttgttcaggacatgcatgctgcaggacttaccggcgtcatacacgagtacctaggtgcgtcactctcgatccgactctgccgaccgacgctgaccgctcgctctttcgcaggcttctacgttcactcgtgcacgaaggtttgtcgtttcagctgatctcctcgggtcgagactgatgttgcgaaacccgttctgcagatgaggtacaagggcgaataccggccatcggagcttctcgacccggtgcgtctcaacaaggccaagtcttgcgcttccgctctgactttctgcctcccaggccaccaacgtcttccatccgctcgagcccctcatctcgcacctcgaaagtcatccgcgcggcgccttcccctttgccgacccgcgaccgccagtcaagctctggtcaacgccgccgaatgcaggcatgactgacgcagaggagcagtgggaggacgagcaagagtcagaggaagacgaggacgacgacgacggtgccttcccgagcccgccgccgccgtcattcctcgacccgtcgtcggtcgagcccgccgtgttcagtcaggtcaaggtcatgatacccggccggggctacacgacactggcggtgcgttcgacgtgccgcggcagctgcggtgggtcgcttcggctctcgtctacgaacgctgaccgtgcggctcactccctccccgcgcggggtttgctctttacgactgcgcacctttggtctaacaggcgtcccagatgagcaaggcacccgcgatcaggcaggcctgcagcgagctcgtcgccgccctccatggcgcgggctcgcaagcacctggcgtcctcgttgacgactcgtccgcgctcggactcgtcgtcgtcgccctttagagcagagcggatcgaagggctctgccgattgtgtgtaatctcgatcgcttcgtttcgcatccgtcgtccgatgagagcgacgatgcgccggtggctccggcgcgtcgccgcgcgctgcccgccgagccttcgtcggcagaggccattttccgccccctcctccatccgaaccaccaccttcccgaccgccttccccctcctcctcaccagtcaggggtcgttgcggctgccatgtctggcttcttccgagtcgatccggccgtcttttttgtcgtctgtacgtacgcccgggggctagagcgagcttgtcgagcagctcgcacgaaagctgacctcgtcgtctcgccccgcgcgcgcgtctccgtccgcagtgcgagaggtgcggccttttccgagcctcgtagcgctttgcctgagctgaccttgacctttgcagacgatcgagtctggccttgtcatctcgatcctgctctcgttcacgacacagctcgtttcgtcgacaccggccggccggccgattgcgctctcgcgccagtcgagccgagcgtccgacgtcggcggcggcggcgagggccccggctcggccggatcattgtccgtctcttccgtgcccgacatcgagccggacgagacgcgggcgctgctcggcgtgactgaagagcgtcaagccaagaatggccgcgagctcgtcctcggcgagcaaggccttcggcttaaacgccagatggacctccaggtgcgcttggcaagcccatctgatttgatagccgcgcttacaaaccgacctcccctccttgtgtcccgctcatagatctggatcggcgtcgtctctggctttgcgctcagtctgactatcggcgccgtcttcatcttcctcgtgcgtctctccaccgttctgcctcgaaatattgccgctgacatgctcctctgcccgcgcccgcagttctacgagacgctcgccgcctcgttcaccgttgccgaggctctctgggagggcacgtttagcgtcctctcggcgaccatcatcctcgtcaccggcctctcgtttctctcgctcgaccgctcgcgcatcaagtggcggatcaagctcgcccatgccttctccgaggcccacgacggtggccagcgccgtggctggtccaagggcaagtgggcgctctggtcgctgcccttctttacgatcctccgggaagggctcgagggtgtcgtcttcatggccggcgtgcgttcctcttttcctccttaccctccttcgcccgagcatatcagctgacactagttctcgcgctgccacaggtcgccgtctcggaccccaagtcgatcccgctctcggccttgctagcgattgtcgtcggctcggccgctagctactcgctctaccggtcgacgtcgagcgaaaaggtcaagatgcacaactttgttctcgtctcgtcgagcctgctcttcttcatcggcgccggtgcgtctctttgccctcctcgctctctgtcgacgtaacagctgacagacctggtcgccgacccacgcaggcctcttcaccaaaggcttcggccggctcgaggcttacccattcgagcgcgcggtcggaggtgacctcgcagagtcgggctctggcccaggcagctacgatgttcgcggaaacggtgcgtctgccctggccaccccgctgctcgacacgtccgctgacgctttttagtctttctgcctacagtgttccactttaactggtgcgtctctctcggaccgtctctcgccctcactcgcagctgaccctcctcgttggtttccaggggcaaccccgagatcaagaccaacggctgggcgatggtcgcccaggccgtctgcggctggaacaacaacggcaccgtcggcacgatcacggcgtacgcctcctactggctggctgttgcgggcagtgtcgtcgtgatgaagtggcgcgagggccggctgggcgacacgccttggtcggctgcccggagggcgggcaagggaccggccttccgccggacgctctctgagtcgagcgagtagctcaaccgcttccatctttcacgacctgcctgccgatttgctcttgccctcgctccgatctgatgaccctgatgaccttctctgtcctggtcaaggaagagaccatgagagtgagagtcgtgtcgttgcgagcgggcgaagagaggtgaagctgacggcgtggagtagcaaacacagtggggaacgtgaggtgacgcggctacaaatgggagggagcaggaagaatgaggatgggagcagaggagggttgcgggacgaaggcgtgggtgacagagattcctttaaacggcagcggcgaccgcctcacgcggcagggcaccgccgaggacgggttcgtcctcgccaggcaggccgtcgagcttgatgggctcgtcgaccgccatcttttcctggtcgcgttcttcttcggacgagtcgggtgagagtggcggtggatcgtcggcgagcacggccgacgggtcgatcactgaagaatcagctgcgggcgtgacctctgcggtggcctctgcgggtgcgtcgacagccatcgaggagtctgcatctgtgaagggcgcttcgccggtgctactggtggcctgagcgccggcgacgaccggcagcgactcggagggcgagtcgatcgaacgcgtctccgagttcgtcgatgaggccatcgcgacgagcgtggcggggacggcgagatttgagctcgagcccgcggccgaagccgaggccgacgttgagttcgaggacgatgcgacaggcgcgccgtcgtcctgtgtaatcgagtcgatgatttctggcggggccggcgcgcagacgtggttgaactttcgggcgtggtcgccgttgccctgccgatagcagtttcggccgttcttgcagtttggtcgctggacctccttttcgagctggctcagaacggtcggccgcttgcgctcccaccactcgtacaggccacacgcaaagatgtcgtcggtgcacgacttgcacgtccgctcgggcgtctcgccgtggaagccgtaatggatgcctggtgaagggaagaggtcagcaatgaatcgcaaggcgaaccgatcatcctgtcgaagacgcaccctcgtcggtccgccggaagatgcccttgacgccgcctttaaccaggccctcgtccgactggatccactcgagcatctcggcccagagcgcgaccggcgtgtgctcggggtgagtgctgatgtagcctgcagagggcggaacgcggtcgagactggatcagcgctactctcaaaagccattcaacagtctggccgacgaacgggcaaagatcgaaatctcctcggtattgtctcggaagctgcggcgcgcgcccgattaggcaggtcagcacgctacgaaaagtcgagagagacgaagcagacagggacgtacgcgttcatcatctcgtcgctctggccgtcgaggatcgaatcgcagaggtcgagcgccgttcggccccaaaggccctcgcccggctttgagtcgacaaacgtctggggcgagcagatgccgtcgtcatggccatagtagttgtggccgccaggcgcaccacagtagtgggcctcgcagacggagcacgacgtcgtgctcggcgcttcgtatgcggcgagccgcgtgcaggatgcgcactggaagtggcccggcggggtcgggccgtcgagcgggtaaagtgggccgtccgagacggccgagggcactgggattgggcaggaccagccaaaagtattgttcggcgggcagtggcggcacggccgatagcactctgaggggcgaatgcgctcgggcggcggcggtggagcaccgaactgaggaaaggccaggcggttgaggtcagccgtcgacatcagagcgcgtctgatgagagaggcgcacccggagaggcatgccaatgtcccagatgtcgtcggcctgatctttctcattctgagaccgcgccatgtcaggtgcgtggctgagcaagggagggaggcacagtccgtcagtctttcgagcagccatcggccagacccgcccggagccggccgcaagacgtacgcgacgaggacgttgaccatcgtagcgacgaggcgcgaatggcttgccgatgtcgacggcgtccggcaagacgggcagacatggggcgtcgggctcgaggcctttgacggcgaagaagagcgcaggtcaggcttggcggcaggctggaaggacggaggcgaggaaggcgcgcgcagtcgtcacgcaccgagaggtagccgtgcaggcaggcgccgcagaaggcatgcccgcagcctggctggagcgtgacgggctgagagggttgcatgcaggtgtaagggaagttcagcgctctggtatgctcgacagcgtggccagccgagtctgactgagaaagggggaaggggcgagaggggtcgaagcgcaccttgtagaggacggccgcacagatcgggcagcccagctcgctctcgagttcgtcgaccagccgctcgagctgctcagccggctgctcggcagcttcatgctcgtcctcggcagccttgtgcggcagcggctggtcggttggttcatcgacggcggcgtcgagcttatcggcgagctcgcgccccttgcccttgtcgatcccgcttgggccggccggtggacaggcctcctcgccgccgccgccggtctcgctcgagcttcctgcccgaggaggagcgatatcgtttgaccagggcgagtcgagccgcgcccgcttggccgacgacgggccctcggtgtcgtcgtcgtcgccatgcaccggcagtgaagggccgtcggcggaagcgtcgtcggtcgggccgccggcgggcttaggcgacctgctgctgccgacttcgtcgagcggccgcttggcgagcgcgggcggtgggtcgggcgtcggaggagcagaggctgcttctgctagagctgacatggtgcggtctagatagatggaggtgagacgttggcggggtgtggagatgggcgggaaggtcgaggcgagatgagggcgagaccggtgcacggcccgcgacgccagaagttcgactgcgcgccacggcacttcgcccgttcgtcttgtcttcacacggagcgtttcatttcagtgcagagtcaggctctggcaaatcccagttcttgcgagatggagtaggaggaagcgagggcgtctatgtacaaaagaggggcgcacggacgcctcggaggggaagagggagtggggttcgagagcagatgcaagagcgtcggggccccctttacttctgagccttcttctcgaggatggccgagatcgacgaccagacgagcttggggctctgggcggcgtcaatcgcctgccagatgcccgtcttgcggtagtagtcgacgacgggccccgtctgctggtggtacgtcgtcagccggcgccggagcgtctcgacgttgtcgtccgagcgctggatgaggggctcgcccgtctggtcgtccgtcatgggcttcttgggcgggctgcaaaagggttggcgggcgtcagctcatgtcgtgacgtgtgcgggcgagaggcgcgaagcgaggacgaagcggtgaacacgcagaggcataggacgcacttgaactccttgtggtaggaccggcctgaggccgggtggatcagccggccggtgatgcgcgaaatgagaagggcgtcggggatcttgagctcgatcgcatgattgatcttctgctgcttgctggcgagcatcgagtcgagcttctcggcctgggggaccgtccgggggaagccgtcgaggatgaagctgggcgagcaaaggggagtaaggcggtcagaggcgcgatcaggggggctcgggaggggaaggttctgggcagagagacggacccgagctggcactccttgttctcgtcgagctgcttcttgatcatgttgatcatgatgtcgtccgacacgaggcctccctggaagcgagagcaacagcgggtcagcctacgagcttcacagaggaggaaacggcttggacggacggcgtccatgatcttcttggcggcgacgccgagctcagtcttgttggtgacctcgtcccggagcatgtcgcccgtcgcaaggtggcagattttgtacttgtccttgatcgtcggggcctgggtgcccttacctgagaatgaaagccacgtcgcatcagccaggatgagctgctgcccagtgtgacgacgacgacgacgacgacggactcaccggcgccgggcgggccgatgaggatcatccggagctggtcggccggcgaaggcgtcgcggcagccgaggcagcattcttcatgtccttggccgtctccttggccgaggcaacggccgagttgatggagcccttggccgacttctcgaggccctcgaccttgtcgttaagcttgggaaacgggaccgggagaagtagggcaagggtacgcgcgcgcgggccagggagagagagcaaaaggtcagcgctcggggagccatgatctggcccgtttcgaacggctgacgaacctgggagatgaggttcttgaggtaggcaatctcgtcagacatgatgggcagatgaaaggtaaggagaagaggagaggagcgagaaagggtacgaagcgtcgaggccggcgcgaaaaaggccgctcgtctccgcgcgcgcgcgcacaggcggcgcagcgcggcggagggccagcaagcagcagcagagagctcgagcggccagcagcgacggcgaccccgaactgccaacgcccctcccaacgccatgcgcctccttctctcgctcgccgctcttgtcctcgtggccgtcgctccggcagcggccgtctcgtcgacgggctcgcgcgtgctcgtcgcactcgaaaagggcctccgcaaggacgactactcgcacttctgggctgacctggagggtccgtctcgtcatgcttgccttcatctcttccgcgactgactttctcaccctctctcgacaggccggggttaccggctgacgttcaaggcccccaaggacgagaagtcaaagctcgtcgagtttgacgagcgccagtttgaccacgtcatcctcttcacgccgagcacaaagagtacgcgactcttcctctcgtccggctgcttggcctccgctcgcgccgccctagacccaaagctgaccggcctactctgctcttgcatctgctcttgcagagtactcggacgacctctcgccgcaaaacctcgtcacctatctctcaaagcagggtggcaatatcctcgtcgcctcgtcggccgccatctccgaggccaaccgcgactttgcgcgcgaattcgggctcgagttccagcccggggacacccacctaatcgaccaccaggcctatgcgccctcgctcgagcggcccgacgcgccccacacggccgtcgtcctgccctgcaaggagagttttgtcaagaacggcgcgattctctcggcgagcgccaacctcgcccactgcgccccggtcgtctaccgcggcgtcgcccactctgtcccggaaccccactcgccgctgctcgtgcccatcctccacggcctgcgctcgtcctactcggccgagccgaggatcggcgagagccccgacgactcgccctacccggccaagccgctcgccggctcgcgcgcaggcctcgtctcggccttccagacgctcgaaaactcgcgcgtcgtctttgccggctcggtcgacctcttctccgacgccttctttgacgcaaaggtccccgtgaaaggcggggccgaggtcgcgtcgggcaaccgggcgtttgtgcgcgacatcacgcaatggacgttccaggagtcgggcgtcctccgcatcgcctcggcgacgcaccaccgcgaggacgagggcgaggagcgctccgtttaccgcatcaaggacaacttggtccgttccctcttgcgacgctcccttctcttgtgcggtctgtagaactgacactgcccgccgacgctttcgccagacgtacgagatccagctccagacgtttcagccgtcgaccggtgcctgggcgccgatccggctgacggacctccagctcgaatttacgatgcttgacccccacgtccgagccgacctccacccgatctcgcaggggcccggcgcgagcgcgacaaagtacgcggccgacttccaggcgccggaccggcatggcgtcttcaagttcctcgtcgactacaagcgccccgggtcagtctagacgacggcaggcgccgcttgtgctgttcgcttagcatccactttggctgacgcgtccccccttctgccggactctttgcatccccccttctgccggactctttgcatcccccctccagctggacgttcctgacgagctcgcagactgtctcgctcgtccccttccggcacgacgagtacccgcgcttcattctgggtgcctaccccttctacgcgagcacgttcagcaccgtcgctgcctttggcctatttgtcgtcctctggcttgcgatcggcggcgcagagaaggacgcccagacggccgctgcggcgaagaagaaggccaaggtcgcgaagccgctcgagtgagggccgcgcactctagcagaaaaaaggaagggggtcgtctgccctctagatgagactcgactcgatcgcacgttcgtaattgcttgccggagcagccttgcaaggaagcaaggatgtcgacagcgtgaagtctcatccaccagagcgcccctgcagccagttccacagcccacccggcgcgcggccctctggggtctcgtcagtggactctggtcccttctcgccggcctcttcgggcgcgccggacgcaaccttcgcctgcgcgacctcctcctgcggcgcacctgacgctgctaaactcgccaaggattcagctgcgactttgctcaaccgagggggcggcgaccttcggtgttgagggcggttcggcaacgtcagcattgaggctggtccatggcgttcgagcagcagcggcccgactcactcagctgcgcccttgatcctgctcggcccaccggccgccgcagccggcttgacgacgccctttgcgtccgccagactgccgctcgtgatcgccgagagatcaatctcgccgtcgcgcgtcatccacgcgaagacctttgtcccctgctggacgtgcatgttgggctcgagcagctgggtccgcagcgccggcgaaagctgcgaaagacgaatgacgatgcgggccatgttgaacgcatcgacaatgccgctgaagtaggggcggcaccagaggttagcatgaatggcggacagagcgagaggcgatgcggacgcacgaatgtggcgggccttcaaactttcccatgttgagccgcatgatcatgccttcaatcgtcaggtaccggcctttatggacgtggtccttctgcagcgcctccttcaggtgccggttgacgcggccgatcgctcgctgcggagggcgttcggtgccgagtgcgcgcgctagcggggacgacagagtggcggtcggcgcggtcgatctcgacgaagcagtcgtcgccgataggatgtcacgaggagcacagtcgtccagattaagtgagcgtcccagcgtcgatggcgaagacagcggtggagctcccgctgatgagcgccgttgccgacacgactgtaatgatgacgaacgctgcggtggaggagatgaggatgagccggcctgagggatttctgctgaaggagctgccgccgaggcgactgttggagccgcaggtaatgtcggctcagcggctgagggctcgatgtctggtcggtcgtcctcggagccgtcgttgcttgccggcgccaaaggcgagttgatcaatgccggctcggtcaacgggaactgtatgacaggttcttgcgtctttctgatgaggtcgacccgccatcggtcgtgcagcgccgtcttgaggtcgagcacgggtccgctgaggtatgggtagagcgccggcttgaggcgagagatgtagagctgcttcgtgacctgagaagcaggcgaagacgcctcacgtcagctgctgctttggcctccttcttttgcactagggtctcacgaagtctctcaggtcccagggctgagagattgagccaatggagcgcgttagcgattattgaagcgcgggcgccatcggtcgcgctacgcacgccgtctgtgacccagatccagtccttgtcctctcctttggcagtcatatccaggccgtgtctggcgagccagcgctcaaagtcaagcaggacgtccgggaactcgggcgccgcgttgaccatcgcctgagtgatgccggtgagcttgatgcagaactcggatagctttggctggaacgtcggccggacgtaggattggaaggacgacgcgatatagagctcctggctgaagggattgccgggctttggttggattcgccatttgaggaggacgacagggaactcctgaagaggtcataacagcgcgggtcagccgggcgtcggcacgactcatcggtcgatcagacgcacgatgatctcgtttggatagtcatagtcctttgatgctgactcacaggtcccctctgcgtcctttaaaggcgtcgaacggatgatggcaggtcagcgccctacgagatgcgcacaaggcgactgcggcagcccgcgcttcaaccgtcacggccaagggcctacgcacaaagagcaggaatgccttgaatttctgtgaggccgtcaagcgaagccagggtcagagaacatccatgttctttaagacggaaaggacccacgccagggtagcctcgtgccgggagcgacgacgaagcgctggcggctgcgctgctgtcttcagagggtgaggccgaccggctggccgttgccaccggttgcccctcactttcgagcgtcgcgtaggccttccgtgcacgcttcagaagcgtttcctttttgccagatgtggtcaggccaagacctctgagcgagtctacgaagcgtgacgatcgtccagagtcagcctaagcttgagctcgcgcatccgagctcggaacgacacacgacggagcgactcgaccgtgtcgttcgcacaagggcggcgcatcgcagatgagcttgaccgtcgagcgactgttctcagagccagcatgcactcgtctgccgggctatggcagggcgctgcaaggcaaagagaggcttgggcggtggtcgacgtcgacagggtgcgagcaggtgccaaacggccggcagctggcccctgacgttgcctcctgaccatcacctgcctctcgacccgacaagagctcgcaagatggaagaagactcgtcggacgctatgctggccgctctagagggcctcgagcccgtcgtcatcgccctctcccagcccggggccgacttcaaccgcgcactgcacgagcagcacatcgccctcgcccggaccgccggcctcgaggaccaggagcaggccgcccggatcggtctcgtcgagaagctcgcctgcggagagggtacgtctgccggtcacagaccagctccgttgccatcttgaccttctcgaagctaacgcgcgagttcttctgttccgatagacgtctggctgccgctgctcgccgacgtcagggcgcaagcgaacctcgagagcgaggacgacgtccagaagctgctcggtctgcacgagtactcggtctcggactacctctgtgcgtctctccccatcagggtcgagccatgtctgcgcagggttctgacgcttgcttcgacttcccgcttcagccgtccccctgctcgccgcccgcgctcagttcatcgtcgacctgtgggacggcctatacccgcgaccaacggcggcaagcgaggcggacgaggatgctgacgccactgagggcacaacacctgttcagaagattgagagcgctgaggttaaggatctccttaccgaggaggccgtccgtgaggtcctcaaggactgtgccctccgtgccaacgcgcacctcacccgcgtgcgtcctgcctcgccgcctctgctggcggacccaattctgtctgactgagcttcgctgacgagagatgttcacgtcttctagagtcacgaggtctgggacaagctacgagactgggagctctcgctgctcgagacggtgcacgtacgtgccgccctcttgtcgcgctctcggtgcgcgcagtcgactgacctctcgccccccatactttcgtccgatatgcagagcgacgacgtgtgagcctttctgccttgagttgcgtgcctgcatcttggttgagatctgaccttgtcaggcccctctgcctctgcagctcgaaccagctgccacacctgcagaagctgttcctcgaccggctccgcatgccgcacgcgacggcggacgacaccttccaggcctacacttcgttcgtcagccggcacctcgagaaagactatgagcagctcctcgtcgaggccagcaaggccaaggccgacggcgtcggcaagtggagcaagcgcgagcggtgggaggcccagctggtgcgttagccttacgactctcttgacacttgctgtccaagctgatccctgccctcttggtgcgtatagcagtctggcgatgctcagagccggctcgtcacctacccgacgtacatcgcttgggagctcaagcccaagacaccagacgtcactcgcgtccgggcggtctacgcgcgcgcgatcgccgacgcggcttccatcggcgacgttgcctcgctcgagacgttttggctgagctacctggccttcctcgtacgtctctttttcccccgcgcgcgctgtcgagtccttgactgatagtttctctttaccccttgggcagaacaagaatctgtgcatcgagagcgtcatgctgcccgaagtctttcgcgccgtccggagctgcccgatgagcggcgagatctgggcgtggtacatcaagagcctggtcagtgctccccctgccagtcttttgcgcaacgagtcgctgatgcctagtatgatctctttcatgcaggagcgcttcttcaagccggcagacgagattgactccatctaccgctcggctctggcctcccagcagctgaccctgcgcgatggaggcgtcgaggaccttgtgaaggtcgtcatggcacgtctcagccaagagcggcggatggtggaggaggcgcagggtcagtcctttccgcttgggccttcttcgacggccgaaggtcggacgactcctgagctaacttgtttcaatcctcttctagtcgaagactcgtccttcgtcgaccttgccctcgaagcgagcgagacggtcaagacggcggtgaagggcggcgacccgagcttccgggtcgagaagtacctcatctcctgggtgcgtcatccatcaggctcgcctggaacagtcatcgccggagggctgactgcctgccacttgcatcttcagtttgagcgccagggacgtgacgaggaggccggggctatctgggaaagccttaccaagacgcattcgtcgtcttacctcgtctggaccgggtggggcgatttcgagacgtgcgttccgcctggccgccttccttctgcacaatccagctgaccaaagtacttttcgctcgcagccgccggccggcaatccctcgtgcgcgcaatgtctatcgatcggcgttgagcaagccaaacgcactcgattggcccgaggcggtcttctcggccttcctttcgttcgaagagatgtttggctcgctcgacacgctcgaccaggctcgtctcctttatgaaaaggcgcagggctcggtcgccgccaagcggcaggaggtacgttcgaggcttgccgaagccggtcagatccagcaggtcctgacaccctcttttgttggcacaggtcgctcaaaaggctgccgaggagcaggcgcagtacgcggcttaccaggcgccgcagatcacgccttcagcaccggccgaggctgaaggcatggacgtcgacgagcctgcctcggcagaatcgtcggcggctgggcaaaagcgcaaagcggacgaggagcttgtcgagggagaggtcaagaaggctaagccgggttcgttctcaccgcactgcgcagtctaccctagcgtctcgctgactgccttgctcgtttacagaaagacccgcccccccggtctctctccaccggtccgtcgcagtcgcttctctgtacagtcttcatctaccccacattgttgacgacgctgcctcgataaccacagcgaccgcgaacacacgaccgtcttcgtcggccgactcgcagccggcaccaccgaatgggatctgaccgagactttcaaggatgtgagtgaaggaatcgggcgtgagagtccgcgcctgtgtctgctgacgaagccgcctgcgcccgtcacagtgcggggagatccgcgagatcaagatcacgccccgcccggacggcctcacggtcggcaccgtcgagttcttcgagcggaacgcggtcccggccgcgctcacgaaggacaaaaaggtcgtttgcggcgccgagattgaggtctcgatcgcctggcagtcgactctctacgtcgccaacttccccgaggcagcagacgacgcctacatccgcggtctctttgagccgtacggcccgatctacgagacgcgctggccggccaagaagttcaagggctcgcggcgcttcgtttacatccagtttctttcgccggtgcgccctcctcgatgactcgccggccgacgtcaatagctgatcgtgtaccgctatctctctatcgaacagtcgtcggcgaaggcctctctcgagctggacggcaaggagctcgagcccgagcgcgtcctctcggtcgccatctcggacccgaagcgcaagaaggagcggaccgacgccaagctctcggacaaggaagtcgtcgtctcgcaaatgtccaagttcgtcaaccgcaaggacctcgagaagctctttgcgccgtgcggcgagatcaaggacatccggatgaacctcgacgacgacggccacgtccggggagcggcctttgtcgaatttgtcgacgaggtgcgtgcccgaaatctttcgctgcgcgatctgagttcgactctgacaactgcactgcacttgctgcgccgcgcgataggcgtcggccaaggcggcactctcgctgagcaatcacgagctgaagaagcggcgcatcgccgtcacggcgcccgaccgccgggcacagaccaataccaagtgcatctagcaggcgacggctgatccgtgaggttggcgactgacgcgtgcttcgccttgtcctcgcaggatggcgctcgagaagacggtccgcgtcggcagcctgccaaagggcacgcaggaggcgcttctacagcaggcgttcgagaagatcgcgcccgtcgcgcgcgtcagcgtccacgagaggacaaacgaggcgcttgtcgagctcacctccgaggaggtgcggctctggctctcgccactcactgatctgcccttctctatcgctgactcgacgctacctctcctgctccccaggccgtcggccgagtcctcctgagccacaacccattcgagtttgacggcgtccttctgccgcttctcgtaggcacccagcgatttccgctcaaaggcttcaacgctgccgccggctcgtcgtcgtcggcaacggtcgggggcggagagggcccgtctacgctcctcacgccagcgacgctcctccggccggcgccgaggccaaagtcaaaggcgagccggctcggtttgggcgcatccgagaagaagcggcccgccggcttcgggggcccccctctgccgccgggaacgacttttgtcaaggcggctgccggcggcggcagcggcgagggcgccttggccactggtgcttcctcgagcggcgcaccgccggcggccgccgccgccaaaaaggatcaggacgccttccgggcaatgctgctcgagaagaaggcctgaggagaaggaggatgacgttgcgcgaaggaagggatgatgaatggcctgacatcgttgcgactatgcccgacgaccgactcgactttgggggcccgcccggcctgcccatgcggtgctgacgagcagaagtcgagggcggacgcgagccgaccgccggcccggcgaggggtcgggcgtaagccgaaaacgagcccgaaggcgacgcgctgatgctggccggccgagctcagccctcgccccctccgacctgccaaccaccacacccttggcccgactttttcctccttcccagcagctctacccttactccatcgccagacgcaccatgccttgggcccaggaccctagcgagacgctcaacagcgacctcttccacagcttgcaccccatcacaccggccgagcacaagaaggtgcgccttcgtcgcccgaggccccacagccttctctgtcaggagctgatcgccttcgcctttgaccagaccgtctcgaactgtgcgagccagctcagcctgttccgcaactgcgtccagaagcagccgatccagctcgaggaccacgtcgccgccgccaactgcgccgacatcttcagccagctccggtcgtgctcggagcggacggtgcgcgaggctggcctaagccgcctgtcggccgggagcaagacgccggtcgagcaggcccgattccagctcgcaggctcgttcgcatagcgaccgccgtcgtcgtcgatgtctgtcgctcttcgttctctcctgctcgtgtcggccggtccgtcgcctggcgctcggctcgggggagtctcgtgcgtcgtctctcaccttcccgcgcccttgctcccgtcatcacgagctgacctcatcgacctcactctcctccgacagcccacattcagctctcgctcgagcctacacgcacaccctccggtctgccttgatcgcctgtcccctctccatcgtcgtcgctcgggctcggtccaagttggacgctcggccttgccttcgatcccgccggccgagctgatgctcccatcgcggagcttgcatcagcccacctctgccatctctccccttttcttcgacgccttctccctctctgtctgcggttctcctctcgttgtaacacctatcatgccctgaacgccccctttcctccccgatctcgcttggctgctgaaaccgacggtcccccggggggcaggcaggcagctcgacgcggggcggtggaagccctgcgcgtcgtctcttggagaccccgatggaggacgacgacgccacgccacagcgggccagccatccccttctctctcctgcgtgagacgtcagcgtgcgcagggaggtcgaaatccgggcggtggtgccagggcgagcgggtggagcgaagcctcagctatcatcgacaaaggcaggccgacctcgagctctccttcttgcccctctacgaccatccacccgtacccgctcctgccctccagaccgccttcctcattctcctaccatcatgtccgcttccatcgccgtctcgcgcctcgcgaccctagcctgccgcacggcctcgacgactgtcaactcgctcgcctcctcggccaccaccaccgccgcctcgccgaccactaccgcccctcgggcgttcgcctcggccgccgccaaggcaccggccgctcccagccggccgagcccgccaggccggtaccggttcaagcagccgcgctggaacccggcgcatgcgagtgccgcttgcttctaaaggcgagcccttccgcttcgatcgagcgctcgaacgtcctgactgcaggcgggagagtgcgttccttccttgaccaggcttgctggcatcggcgccttgtgctgaccgcgttgtcgtcttctctccgccagctctcgcgcgagccccccgtcgccgtcgttgtcgcctgcgtcgaagctgaccgaccgatgacgtctctgatcttgccgggccgaccgaccgaccatcgacggccatatccatcatgtatccgatattcccccactccgccggccgaatggaacgacgaacgggcacgcagccgcccgcccttcactcggcctcctactgtattccctagctcccacgcccacctgatgatgacgcttttatgcagccctcatcatgacagaaaagagaaaggaaggggttcatcgcattcgtcagggctggggtcgtaaagattttctagtcggggcgagccggctcgtcacgctgcttgcgtcgtatagcgctggatggcgcgctctgcgccgctcgtcccgagggcccagagtgtggctgctggcaggccagagggaggtgtaaagtcgtccttttgcgcaaacgaggaacaccgcgggcagagagagaaccatcagcgtgagggtccaaggtcgggtgaatgtcgccgacacagccacgcacctcgtccgtcgtcgagaagaccgagagcagcgtctcgaggtgggccgtctcctccttgatctctcgtcgtgcaagcgcctcgagttccttcatgacgacgttggtcaccttctgcgaggccgaagagggggccgcgtcgtcagcagccgtctacgagagacaggtgatcaggcgcaggacgcacgcggatccgcgagtcgagccggacaagaccgtcaatgacatcttgccggaccggctcgccagtgctcagcgagcctcgaaggctcccgccagcgagggtcgagccgctgagcgtgagcgacgggctttgaagaccggccgtcgagggcgtctcccagcctgacatggggagcccgtggccggacgaggccgagccttcgccttcgacgggcgaaaaggcgccctgcggtgccgtcggcgtcgtcgacgggtagcgccaggctgtcgtgcccggctcgccgccgtgaggagcggccgagacccgtgtccccagctgcgcaagtggagtcgacgaggcgggcgactcggccgaggagaatatttgctcgagcgtacgctggagagggaccggcagggagccgagctgcgagcggaagggcgcctggccggcctgaggcggcgtaaggaagctggcgagcttgctgtagagctcgatcaagatgtcgaagaaggtcgtgagcgtctggaagtagtctggcggaaacggctgccgagcaggaggcaacgatggattagaccctagccagacgtcgtattccgaagcgagctcgctcgcacctgattgtagaccatcagaaagtcggcactgaggtcgcccgagccggcgcccaacgagaggtcgccgccctggccaccgttgccgatgctcggccgcttgcccgacttgctgccgcccttaaagattcctttcatcgtcccgcccttgttgacggccggcccacccgttacgtgcaccgaggcagcgtcaaactggtcaagcgtccggttcgtgtagaggacgacgtcggcgaggctgcggatctcaagcagcggcgcaagcgacatgccgagaagcgagaaggcgtacggccgcgagcgcaggacagacgactcgacgccggcctggatcgcctgcagcggcaggtggattgtgttgctccagtagagcgtcctgcagcggcggcgagggtcaggcacatacagggtcagcctctgctcagccggaacgacgccaggctcgccggcgacacggacccttgatgcgcccgtttgagagcatcccacgtcccgagccgcttactcagcatgtcgaccaggactgcccgcgtcgtccaggtgacgccgccgttcgagccgcctgcgatgccagacgcgacgcttcccgcgtagctccggtcgggcacggaccccgagacgccgagcgtcgtcgagtatgtgacatccgagaagactgagccgccgtcgccagcgtcatcgtagccggctccacccgcgcggccgagcgagccgtcccggccggcagaggagaaggctggcgaggtcgaggaggggtagaaggctgacggaggcggaggcggcgggagtgccggaattgacgacgacgacgacgagctcgaaccgcccgtgctcgagaaggccgacaggaacgaagacgacgtccgacgagggaccggccgatgcgaaccaggcggatgcgacatcagagcgaggagagggcggcggtgagatccaaggtcgacgttgcgaggccaggagcgacgcgacttcgtgctcgctccgcttgtctggctccggctgcggctccgagaaaccctggctcgctcaagctctccgtcctcctcagctatgcaacgggacaaagcgctcaaaaggccacaaattcgttgctcagctcctgccagaggttagcatagtgggtggcagctcaattgagccggccattcgagtcgcaagggaggccaccctgctctgcgctctcccttttcaatcttgtacgctgctcgttctgccatgtggttttgttcgtcgccgtctgcagaagatcgtcagccgcgggttcggcctctacttatagtcctccctcgcccgcagagggcaagcgagacgaccgtcagactgtcctgcccccccccccccaccccaaccgggagggacgttcaactgccaatcttgtggcctgactctggtcagtcgggctcgcaggctctgcccttactacgcatcagcagctcctggatctgactggtccgactctcggcgggcattgcatggcgtccgcaggccctaacgaatgaggtcatctcgagggccttcaacggccggctcggtcgggcgtagtgcgtctcgagttgacgtcctctaccgtcggtagtgcagccagtcgctgaccgcctcgctgatcggccactcgcttctggacagcctgctcaatacggccatcaacgtcaccctcggcccgagcgaggaccgcatcctccagaccggcaagcacaccgttcaggactgcatgtgccggggttgcggcgagcgcgtcggctggcggtacgaggctgcttccgagattgcgcaaaggtgggtcctttggcaggatgcccgacaggagcaactgctgatggatggctattgcggctgacgatgaccaccctcacgccaggtacaaagaaggcaagatcatcatcgagagggagtgcgtcgttaaggaccgcggctgggatcgcgaggtcgattgagattgttcgatcggctcctgtatcccgtctctcgcagctcaatccggccatcacggtcctcctcgcctcgcagtacggcctgcccgtctcgacgaccatgtgcatcaccggcgcgaccctcggcgtcgccatggtcaacatggacctcaaggccttcaactggcggacgttcggctggatcgtcctcggctgggtcatcaccgttcccgtcgtcggcaccctgtcgggttgcctgatgggcatcattctcaatgcgccgcacttctgatgattctgaacgtgcttcttagcccttttttgttatagacgaccgtgcctccttcgacggtttccctgccttctctcatctccttctcaccactcttggcccgctcagccttagtaatctagtccccaccctcgctccctgcaatcacaatcaacaccctcactctttttcctgcgggccggcaggaatatgtacgcctcttcatgacttgcacgagactcaccaagacgctcgtaatgagaaggagtggccgtcacttgcgctgcgcgccgacattgacgacggccagcgaccatcctccaacagcatcgccccagactccggtgcaaggccggcaggccgctctcagacgacctcggatcgagaagggcggggcgagagaaacatcgtcgtcttatcgggcctcgttcgccagcagcaagacgtcaaaagaaggcgaccatcctagagcagtcaaccgacgaggccgacgagggcctagacctgctggtacgacgtgctcgatttgctcgaccaggcccgctctgccgtcggcgtggccatcggcgccaggccgtggctgtctccgtcgccgtgggtgctggcctcaactcggatggcaaggaagcgagccggccagaagtagttgaagccgaccatggcgaggaggatcgggagcgcgtcaaagacgtacatgtaggcttctgagagacaagaggtatcagcacaagtgcgagaacggagagggatgacgagcttgctcaccgttggtcgcgatggcgccgtcgtgcccgccgccgtactcctgcggagggggccaagaaagagtcagcgcaaagtggcgtagttagaggcaaggcagcaaggggtcgtactgcggcgcgatagacgcagcggatccagagcaaaaccgatgcggcgagcgtcgtccagtaggcaaccttccagttgtcgacctcctgccaagagaaaatctccttgggcgaccacgagaagcggtcgtcgtgatggtgccagagccggacgtggcgcgtgcggctgccgacggggatgtgaaaggtgcgattagacgatggcgaccggtttgaacgggtgcaagcgccgactcacaggcgatgaccaaaaaggcagaagatggcgatgaagccgctgagcgagactgcagggcgaacagaacgagcagcctgtcagcgcctgagggcgaggagagcctggcggaagccacacgcactgagctgaatgatgactgtgagaggaggcagcgcagaggcgggtcaggagagcaagcgacgagagacgccacggctgggacgcactgccgacgagagccgtccaagtgccaatcttgcccatgttgccgttctggatcgacaaacccgagccgccgagctggacaacaaacgtcaggatgtcaaccgtgacaaagagttttgcgatccggcccggtctgatcggcaggcactcgcgcgcgaccgtctcgggcccgagggcgttggcgatgaggccgagcagctggtagcacgccgcgagcatggcgcagggcgtgaggaggatgaggaacctgcgagcgcggcggagcgagtcaaagggagtcagctcagacgtcgaacattggggcgaggcgcagaccgggcgcactttgaaccagcatagattgggatcgaccatggctatagacgtgcgacaggtcagcaagacgacgcatacggttgagctctcgacgggccgcaccttgaagtgcgagaggacgcggatgccgaagccgatcgacatgccggcgaggccgatcgggagaaagatgacgatccggcgcttcatgtagtctgccgaaaagcaggagggcgaacggtcagccgaggacaggccaagggcgcaaggcaaagcgacacgtacgaagaaccgaggtcacggtcaggacggtgaagaatagggcgaagatggctgccgcgctcacgtccggcacctgaaggagggaagcgatcagtcagcatgggcaggtggtgcgagggagctcgaaaggggcgacgcacgtagccggcgatcggccgtttgtagttggcgtcggctgggtcagccgagaactcgtcggcggcggcggcctggcagtcgaagagacgaggatggcaaggtgtcagctacaggcctcttcggtcaaggccgaagcgaagcagtgaaggcgtacgaacggtctggacgaaagatccgagcgcggccaggccggcgagcagcaggtgggaagagcaggccgaaggcatcttgtgagggtcgacaaagctcggaggttgaagcgagagggcgtgcaggaagagctggtgccgacggtcgtcattcttaacgggttctacttggcgaggcgcgagtgacgaagagagcttcggcccctcggcttcggccagctcgtgaacggccaagtggccgtgtttcaggccgcgagaggaaaaaggggctagcggccacgcgctcgctcggttggccgaccgcgccgccgaggctgctctagggcttgtcaccgactgtccaagcgagctccaaagcaggacaagcgagccagcttagacgtctcctagccactgccagtcttgcggctctccatccggacgccaaacagcccaccaagcagacgcaggtccgtctgcctcgtccacgtctctttgctccgctggtcgttctcagcggccgcacttgacctccgtcgaacgacggccgcacgcagccgttcgtcgtcgttcatccccgcctcgagcgccgcctcggccgagattggccagagccgctcgttcggctcgtcgcctgcggcgccgcctccgctgctgccgccggcagacgccgacgggtcaagcgggtcaaagccgccgacgctccctcggaggaggcccgcgacgccgccaataagccaaatctctacccgcgcctggagctcgtcgtcgaccgcgacgaggtcgacgagcctttgggcaaagctcgagctcggccgattgctgccgtctcgcggctggttctcgaacggcagggcgctgagcgagagcatgcgcgggaggtagaagacaacgtgtggaagggtgcgtagggccgagcggatcaggacggccgggtcgatgagcggctcaagctggatctgatgcccgaccgaccgaatgggcggcatgtaccggaccgagagcgtcctacacgtctctcggacgagcgcgacgagctcggcgagcagctcctcgctcggccggttgagcgtcacgccgagctgggtgagccggagtcgggcgagatgggcacgcgacgtttcgttcgtgcacgtgtcgagcgggaggccgatcgcgaggatctcgagcggcccaccggcccgggcggggatcatctggacgccgagcgggaaggccggaggcggcgggaggaagggcgacgaggcatgcgggaaggtcgggaggagcgagatgctcatgactcttcgcaggcgcgggtcggcgaggatctcgtctaggcgttgcaagagaggtagatagagagagagagaaagagagagagagagagagagagagagagagagagagagggagggagagagagagagagggcgggcgtcagcttttgtcgtgaggcttctcaatgggcagcagcgaggacggacagagttccgacggatggaggaagccgtcgaggagcgagagcgtctgcacaaacggcaggacgtggcagtctggatcgcggagaaagtcgttgagaaagttggcatacggccggccgccgccgaggacctgtcaggcagacggcgcggaaggagggggcgaggagtcaattctctgggatcgtttggaagcggtaggctgcacgccgacggacgagatcgcgccagagctcgcgccggaggacggcccaccactctttgcagacggtcagccagcgccagctgctcgtcggatagccgttggccgaacgatgctcgccgacgatcgaccggtagtgcgggttgtttgggtgcagcggcgagcgcgcgcgaagggcggcgagctgggcgtcggagatgggcgagaaggggtcgaggacgacgggcggagggaggatgagcctagaggacgaaggcagagtcagcagcaggcctgagaaccatagatgggaaaaggacggacgagcgcgactcggcgagggccatcaggaggacatgttcccgtagctcgtagggcaggtcgctcaggcggaacggccgggcgttcgaccagacatacttgccgacctggagggtaaccgaggccgtatctgccgagagggcgttggagacaccgacgccaatgttggtggcgacgtttgcgatggctggtagagcgagcggcaggaggaaggccatcgtcgagtagagatcctgatggaggttacgagggtgcgagataggcatcgctcgtgtgcgcggtaaggcggcccgcagcagcagcaagcagcagtcgcatgaccctccgttctgctcgagacgaccgcaacttgcctccgaactggacatacagcatggattgtgctgctctgctatgctggtcgatgctctcgtgctgtgctgtggacgaggctggcgtgccgggagggcgagcgacggtggctttgacgtcatcgcctccttgtcgccttggatgtcgcccatcttggatcgacggctcgaccctccccgaccatcaccatcaaccatgtccttcctccttgctcacaccgccctcctcggccgctcggccgcccggcccgcctcggccatttctctcagctggcggggcgtcaagacggccgatgccgacaagaaggcgtcggcagagagcaaccggccgacgggctacgatgagcagggcgcttcggtcggtctctcttcctccctctctggtgctcgactggcggctgacgattcttctgcggtttgctccactttaggccgacgccgtcgccgacacggacgctgcgttcgagcccgggtccggccccaaagagtcggcccgtaaggtcgagcaggaggtgcatcccctcgccgcctgacgatcgccggcctccttctgctttgccaagcaagctgacccgcctcgcctgcttcgcccgctgcagagcggccagggcatgcaagactcagccgcgtcgaggacggcctctgacccaaagggcgaggcggccgagcctaagaagtgaagccccccctcaacaggccatctctttccgttcgaagggacgaatccggccggtcagcacacgcttcggtctggcgcgtcgccagctggagacatgtctctctatttcgatctcgttcgctgcgcgctcttctcttctctcgctctcttgcttctctgcagcctcctcgtcgtcgtcctccctatctgccatcatgatggcccttctcgactaggttcgccctcgaaaacgagcgcgtcgacgctgatgcctgcatccagagcaaaggttaacctatgccctggaggcgggcccggtcgttcctcgtcggtcgctcgcagctctccatgcggctcgcgatgggcgtccgagcagcttgtggggcgagggcgagatcctctgccggtcgggtcattaagccagctctctctctttaacgacccctgctgacgaccagccagtccagccgctcacaaagacgcttccgtcctggctccagcgagcgcggcgggagccgtctggctgtcggtcgacccacctccacctgcaagtggaggttggaccggacaatcgctagaaccgccccccccccctccttcccagcccaactcgtctccccgcatcctccttgtcttcgtggctttcccggggggggggggctcgctggcctcggaccggagcagcccatggggagaggaggggggagaaggaggggaagagcggaccgcgccaccgcctcgtcgctgaggccccttaggctcctcccctgcattccttccagtcgcaggtccgactcgacccccttcccccgggggcagggctccacagacaagggactcctgttagcggatgctagagccgcgcgcgcgcagagctcaggccaacctctgctgtcgtacgaaaggcctcgcgccctctcaaagggccgaccaaggggacgatcaagagcttctcttcctcaacctccttcctgcttatctctcccctttgccctctccagactcctcccgttgagacaatgcacgacaagcacctcgatccggcacgccgcgccccctcgcccgtcggctccgagcagacaactgacgagacggtcgctgctaaaggcaacaatcgcccgaccaccgtccacggcaaagctggcccgtacgagctcaccgagcaggccgcgtacgaggcactcggcttctcgttttcttccgcccggaagtgcgtgcgcgacttcgttgatcgatcggccggccggtcgattgattgggtcgagctcgcgccctttggtccgagagctgacggggcgctcgtctctgaccctctcacgaaaggtggtcgattctttgctgcatcttcctcgtccaggtcagttctgctgctgtctcgtccttttcttgcgcatttatcggccgctgacctttgcctctgccgtcaacagtgcagcatgaacatggtccgtctcgcacccgaagcgacgattctggcccgatgctgaccacttagacgattcggcacgattcagaatgctagcctctacgcgtctgtcgtcgtccacgtcctccagagcgtcctctctctcgacggctgactctcgcgcccaccttcagcaacggcgttggcggcatgtccgagcactttggcgtctccgagcaggctacgcgcgtcggccaggtacgttcgctttcccccaccttccagcctcgatcgccaactgacgaattctcctcgctctccgctgctaggccatcttcctcatcgcgtacggctttggctgcgagctctgggccgctccgagcgaggagctcggccggtggccgatcctccaggcgtcgcttcttcttgtcaacggtgcgccccttgtgcccccccccccttcagtccccactctggcttaccatctttgatttgatccacctcccagtcttccagctgccttgtgcactcgcccagaacttcgggacgatcgtcgtcggccgcttcctcggcggcctgtcgagcgccggcgggtccgtcacgcttggcatggtcgccgacctgtggcagcccgacgagcagcagtatgccgtctgctttgtcgtcctctcgtcggtcgggggcgcagtcatcggcccgattgtcggcggctttgcccaggcgttcctccactggcgatgggtcgtgcgtcgcccgcaatccagtcgaccgcaatccgaacctcgagctaattcccttcctcgctcccctccttcctcctgtagttctggatccagctcatttttggcggtgcggtccaggcgctgcactttttctgtgtcccagagacgcgttcgaccgtcctgctcgaccgggaggccaagcgccggcgcacgacaggcgaggacccaaacgtctttggcccgactgagcccgagatcaagccccatcggttcgacacgaaggaggtcgtcgccgtcatggtcaggccgttcgtcatgttctaccgggagccgatcgtcctctgcctctcgctgctgtcgggctacgcggacgcgctcgtcttcatcctcgttcgtatccctccccctcctcccacctcttcagtgtggggtcgcccttcgtcgctgacgcggttttggctgctcctcctctgtccttgttccgcagctcgactcgactggcccgttgtttgcaaagtggagcttcaccgtccagatgaccggcctttcctttgtcgcgctcgccgtcgcctacctcatttcatactgcattcacctgtttgtctttctgccgctaccttcgagcttcagcgtccgggactgatccggcctccccacgtgctacagcatcgacatcagacgccaggtccggctccgcaaggccgacccctcccggcctcccgaggaccgcatgtggatcctccagtacatcgtcatcctgctcccggtcgggcttctcggcttcgcttttacctcgctcggtccggcctacagcgttcactggatcggtacgttatttactcgtcgctagcagttgcctcataacctgactctccctcccccttctttcgacccagcgccgatgattttcatgagtatcttcggtgtcgcaaatttctccatctatctgaccacgattggtgagtgacccggtgcaggttctgctggcctttccgttcggtagctgatgagcctcggctcaccatcagactacatggtcgccgcttacggcccttacgctgcgtccgcctgtggaggaaacgtgagccgacccgaccgctctgcctgtcgacagtgcagctgaccttgtcgttcttccgccagggcatggcgcgtgacgtccttgccggcgccgccgccatgtacgcgacgcccttttaccacaacatcggcaccggcaccaacttccgtgagtcggcctctattcacgtcgtcagtcgtcaggaggctcggccagcactgacgagacccgtgctccgaccgacagagcttgtctggccgtcgctcattctcgccatcctggcgctccctctcatcatccccgtctacgcctttgttcagcacgggtgggttctcctacattccatcgctgcctgagcggagcgtcgcacgctgacagttctttccctccactcgtcgcgcagcacctacttccgcgaccgctcgcactttgcacagacgctggccgccgagcggcacatcaacaacgagtacaacccggccaaaaagcgcaacgcccaggtccagcacgtcgaagacgctttttccaaggcctgatgctcgccaccggcaagcaagcttcgcatcccgatcgatagcccgctctgctccgctttcacccccttcttgactgcctatactagagactctagagtgcgaccgtatagatgctacttaatgaagtcgaaggagcagggagattgcgcgccggcacccgcaaagtggaagcggtcagagcaacacaagtgactaggccaacgaggtgttgaacaagaggcctcgctgtcacaactctaagcggctgagtctgcactgaaggcaatgaaagatcctcatctagatctgcctacttctactttggcggaggcgcaatcagggccttgatgatgcccttgccgtcggcgctcttgccgttcttggtcgcgttgaaggcctcgacagcctcgtcaaacttgtagtctgtccaaagagagagaaagtgttagcgctaagtggcgagcgtgcttcgccctcaccgacagggacgcacggtgcgtgatgagaggcgcgagcttgacgaggcccgaggcgacgaggtggattgccgtcgtccaggttccggcgccgtagcggaacgagccgatgtactcgccctgcttggcggcccaggcgccgacggggatctgagggttgggcgcgcccatgcctacctggacaatcttgccggcctcgcgaactgagggcgggaaggcgagcccaggtcagggacgtgcgcatgagagggagggctcaacagacgcaccgaggtagaaggccatctggatgcagatctcggcgccgctcgcctcaatgacgacgtcgaccgcgcccggcccgcgagaggggatgtcgagcgcctgctggagctcggccgtcgcccggcgcgagaagtcgagccgagcctcgtcggctgcaggcgggggaggtttgaagacatcggtcgcagcgtacgagagcgcaaagtccagccgctcctggttgatgtctgacaaaggaggtgcaaacgagaaggcgccgtcagtaagctgaagagaaaatcaagacagggtcgggacgcaccaacgacgacgacccgcttagcgccaagcgcctgtgcgacggccgctgcaagtagaccgacgggaccggcgccaaagacggcggcgacctggcccggccggacgttggcgagcgtgccgaccgaatggacgccgacggccaggggctcgatcatcgcgccctcgtcaaacgagattgactcgggcaaggggtgcgccaggttggcgggcagggtgtagtacctggataagaagagagtatcagataggagagaccgccgcgagccgattcgcagcggacgcaccggcagagcgtgccccgggtgtacggcggcgtcgccgcgaagcgcatcttcgggcagagctcatacttgccactcgtgcagatcggacagaggccacaggcctttccaggctcgagcgcgacccggtcgccaattgcatgtgaggtgacgttggagccgagccggacgatggtgccctagtgcgtcgcgggaaggtgggagtcagttaggcaagagggggtttgcgagacgaaaggcgcaggacggaccgagctctcgtggccgagcgtcatgggctcctcgacaacaaagtcgccaatgcaacagtgctcgtgataatggacgtcctgggtgtgcaacagggcggagaaaagatacggtcagctgcgggcgtttcgagtgtaggggggggtcgtgctgcgcgcgtcggcaggctgctacggcacgccagagggaggcgatcttccttgctcctttccttggatgacagcgggcgtcaagagcgttccggctctcgcaagagtctggaccaagaatttgatggaagaaagggcagatgagagagcaaagagagggcacgcaccgagccgcagatgcccgtcgccgcgatctcaatcaggacgtcatcgggaccgaccggctcaagcggcgtgtcggcgtagaatgtgtcgtggatgctgatagggcgggagacctgtaggtcagctcgggtgaccgaggcgagaccaagacaagggaggggggggcagaaggcggcgtccgctggccttgagacgcgtcgacgcaagctgtcgctcctgtcgccagctcggcaccgttccgtctcgtcgacggcttcgagtcagttcgagcgcccagactcgagctcctcatcgtgcgagcaggacggatacctggccaagtagagtgtgcacgacgacggtagagagccagccgaccgtcgagcgacaggaggtggagggagggacgtcggacgaacccgcggagaatgaaggacgggttgtcaagcagctttggctcgactgcgctcgtgctcgtgctaaaggccattctgactacgttgtcttgctccaaaagagggctgtcgaggaggaaggaaagagagaaagagatggtcaggggcgacagggcgtctctgcggactgaacagtggaggtcgctgcgcgcggcggcccctcggggctggtgcgccctgtcgctcgaccgctttgctctctcgaaagtaacgacgacccggcgccacggccaccccggggggcttctcgtagagagcagaccttcgacctaacagctggccactgggggccttggtgcgccgccggctcagctggtcgaccggtttcgcctggcggggttcgcgggccgggagcccgagacgttgtccttcgctgcccaaaactgaccctgtccgtcggctcgaccagacgacctaagtcgggaccgccctgtcctggatgctgccggctggtggggcccggctactcgtctcgggttcagcgggcatggcggggctcgaaacgcttgtactctagccctcctccaccttgggcggtcgcagcatctcccctttcctagcccgtagacgctgacgactcaccccaatcttggctcaagcggtcttgttctgaaggcacggtcgacgaggacaagcttcttgtgctgatccagcggatcggttcgcctggccgcccaggggccggcagcaaggcttcgggtcgccctctcctcctccaccttgccctccactcgtgctcaaagtgtgcagagtcgcaggacgcaaggccatagctgcttgacctgttcttttcctcgctggcccgccggcaacgcgtcccttgacctcgttctttcctagcggcccccttctggcattgccgccttcgataccgccttggctcgcaacgtgttcgcgacgggtccccgagggcgcaaccctgaccagtgaaccccttcttctactcctactttaagatcgaagggggagcggatggtgctccagcgtcttgcccctcatccccatccccttcttcccctcaggcttcctccacaacctcacctcaacagcccctcccaccttcgtcatgtctgctccgatgacggacggcaagcccgaagagaagcagcgcgaagtcgcagacgcagacaagatcgagcacctcgaggtcgacgagcgcggcgtgcgtccttccccagctgaagccctctccatctcgcctcgactgatccatccgccctctctcgcctctttcaggaggagtacgccaagaatgtcaatgcccgactacagaacccgctctatggcctctcgcgcgagggcctcagcaagaaggtcgccctcttcaccgcccagagcggactcgaggacgagcgcgagctctttgagaaggcggccatcctcgcccagcaccccgagcggttcgaggagctcgactgcctcgaagaggacgagaagtaccacctccggcgcgagacgacgcacaagtggaagcagccctttgccctctgtgagtgaggatcgcacgtcagacgatcacgcgctggcgctgaccagtttctcgctcgctcagattttaccgtcgccgtctgctcgctctcggcctgtgtccagggctgggaccagaccggctcaaacggcgccaacctcggctttccgcaggcgctcgggatcaagtgcgtagcttacggatcttctcgcagtaccttcacatgcagaccttgatcgtccgtacgctgctcccctctcagcaacgaccgctctgaccctaatcacgttagaaacgagtggctcgtcggcatcatcaacgctggaccctatctggcttgcgtcggtctctcgtgctggatctcggacccgctcaacaattggctcggccggcgcggcgtcatctttttctgcggcatcttctgtacgctctcggttatcggcagcgctttctcccagacttggcagcagctctttttcactcgcctgttgctcggcatcggcatgggccccaaggcttcgacgaccccgatctacgctgccgagaacgtccctgccgtgcgtccacttccgctctgttccgctctgggtgcctctgctttaggctgaccttgaccctcctcatttttcgtcgcagaacatccgcggtggtcttgtcatgtcgtgcgtctgcgtgctctcttgactctgtcaatgcgacgctcactgacccaagatcatctataccaatcgtcgcaggtggcagctatggacggcttttggtatcttcctcggcttctgcgccaacatggcgatggccgacgttggcaaatatgcctggcgctaccagctcggttccgccttcctgcctgccatcccgatgaccatcggtgcgtcgccctcctgcccgacgtcgacctctttttcctgccaagtcgctgaccatcgtccttgaccgtctcgcagccatctacttctgccccgagagccctcgctggctgatgaagaagggccggttcccaaaggccttccgctctttctgccggctgcgcaactcgaggattcaggctgcgcgtggtacgtcttgcctcgctcgtcctggcttgcagactgcacgtagctgaccctctgctgcggcctgacctgacagacatgttttcgtgctgggcggcgctcgaggaggagcgggccatcatgggcggcacgacctactttggccgcttgcgcgacctctttgtcatcccgcggatccgccgggcgaccctcggcgctttcaccgtcatgatcgcccaacagatgtgtacgtcccgcgtttcttgtgcgactggtgcgtgtgctgcgaggccaagggctgacgcgtctgcccccttcccaggcggtatcaatatcatcgccttctattcgtccaccatcttcgtccaggcgggctacaccgctcgcaacgccctcaaggcatctcttgggtttggcgctatcaacttcttgttcgcgtttccggccgtctttacgattgatacgttcggccggcggaacctgctgcttctcacctgtgtgtccgccttcgcccgcggcatctcctgcccccttttttcccctgcctcgaccgccctccgaacccgacagccacctgaccacctctctctgtctactcacagtcccaaacatggcctggacactgctagcggctggattgtgcttcctgatccccgattcgagcccggcccacctcggcctcatcggtgcgcagcagcccgccacccgtcctcccgccatcacttgctgacctccctctcctccatcgcttgcagccctatttatctacattttcagcgcgttctactcgtttggagagggaccggtcccttttacctactcggccgaggtcttcccgctcacgcaccgcgagattggcatggtcttcgccgtcgccacctgcctcggcttctctgcccttctttcgatcgtacgtcgtcgctctagacctggtccctcatcatcgactgactctgattgtcgacaaccttgcagactttcccttcgctcgtgctcgctctcaccacgctcggtggtgcgtctccgcgcgaacgggttcgctctcgcataaagttgctgactctcgcgctttgttctaccagccttctgcttctacgccggcctcaacgtcatcgccttggtggctatcttccttttcgtccccgaaacggccggccgcactctcgaggaacttgacagtgtcttctcagtcccgacggcggtccacgcccgctaccaggtcaaggagtcgctgccctacttcttcaagcgttgggtcaagcgcgacaagacggccacgcttcggtcgctctacaacttggaggacataaagtcgatcactaagtttgagaagggcgcaggccactagcggcgccgctcagcgctccttctccctccttcccatagcccgtctcgtacatttgtagcctcctcgccttccactcgtgacctgctgcgctctccaaagcatgttccatttcctttaatagagtcggtcatagaagagcagcggcggccagcgtccgttggggagaggggaaaattgtatgcgggcaggagagtcgttgagaggcagattcgagaaaagggcagggacgaagatgtaagatcgttaagcgagagagaacgggcggcgagatcgtgacaggcggaagacggaggattgggacggcgggcactacatgaaggcgctctcggtcagccgagcctcctcctttgcgccgctcccgggtgcgcggccgccgagcgcagaggcgtcgtgtcgagctcgggtcgcctttcgctcggccgaggccatctgcatggcgagcgtcgcggccgtgtgcattgtcggggcggcggctgcgcaagcgaaaagacgaagagcaaacgcagggttagctgctgaacggccacgggagctgagcagcgctaggcaggcacgcaccgactcgagggggcgatgccggacgatcaatgaccggagcgggcttctgcaacagacaaaacgcaaaagcagcagtcagcaacagctctcgaaactgtggacacattccgcgacgcacctctttgcggcggaccgtcagcccgcgcttgaccttgccccagccgccaccgctgatctccttctgctttgactcctcgcccgcaccgttagctccgaggttgacgacaaagcggtcgtccggcaggtcactctgcgcgacgggcagcccagccggctcgggccccggcggcgtgcgaacgatgggcgagtcgatcgacgagccgctcgtcgggttgcgcgagtgagtgattgactgaccggccgtcgtgggaggcagcggcgggacgggcggcgcgtcggcgaaggtcggcggcaggtcgcggctgactgagcgcgctcgtgcccggccctgggcgaccggcatgctgcttgtcgaagtcgcgttcgggccagctggagccggtggcggcggcaggggcgtctcgatcgtgcttccatcgcggagcttgagcgtctgcatgccctcgcgcacggcagccggctcggaggtcagcagcggctgagtcggccggggcgtgaccggcgacgtcggcgagcgcgggtcatcggtgtcgtaggcgtcaagcaggtcaccgtagccgtcggcctcgtcgtcgtcggctccagcgaggcggtgcgaggcggacgacgagccggagtagtctgatgggtcggatggctggcgggcgtgggcggctgaggtgacctttatcggcgggagcggaggcgggcgggcgtgctccttcggctgccgctgctgctgatactgctgattctgctggccggggtatgacggctgccggcggtgctgcaaggcgaggcgtgaggaggaaaaaaggtcagccttcggtgaagggacgctcgacggctgcgcgcgcgcagaggggccaaacgaagctaaaagggaggggagggaagcctctcgtacctggtcggccgtcgtccgctggtagtcgttgagctcggccagcggctggctcggcctcggcaatggctggcttatgagctggccttgtgacgtgcttcggcccatctggccttgggcggcggcagggacgggcggcgggccaggagcagcagcagcagcttccgacgaagcagaggaggcgccccctcccgcttgcggcgctggagcgagaccgcccatctgagctcgtgtcttctcacggagcgtcgctgcccggccgacacctccagcaccgatgccaccaacaccagcgagcccggcaccggccgcgctgttggcctggccccaggaggcgagcgagggcggctggtggccgtcggcggaggacgagtgaccgtgcgagctcgtcgtggcggcggcggccttcttcttgctcttggaccgcgtcagagagcggaagaggcccttggtctcggaggccatggctggtcgaagacttttgctgaagatgagaggaagagaggcgaggaggtcgaaggtcggagggtaagatgcgcgaacaggcgggaggtcgctcgtcgtctcgcgcgcgccgcctcgcccgcccgccgcgcgcaggcaggccaaagcgtcttgcggggctccgcggcagcagacaggagagggcgtttcgaagaaaacaaaggggcgaccccccctcacacgcactcttcacactcggtcagtcaccttcctctcttgcttaggctcgatcacaaatctccttgcaagcaatcgtcgtcatcacatgagcagcgcgcggacgagcaaggcgccgatcaggataccgagcgagaacgccgcgggcgaggtgaggaacgaccgagcagccatcggcggcggcggggcaaaggcgacgcggctgtccttcttggcctggtagagggcgaactcctcgtcggtccggacatagtgccgctgaaagaggtcctgttgtatccagctgcaaaggaggagggcgtgtcagaggagccttcgaacctgctttggcaagacaaccggacgcacagaaccttgttgacagcgccgagcaccttggtcttggcctcgagcggcagcgtcacctcgtcgatcggcagtacggcgttgatgaggaccgtctcgacccagccgagcaggagcgagcacgcgagcaggtcgacaaagagggccggcttgccaacgcggtgcttgaagccggcctggccggtgtgcatgagcccgaccttgtcaaagtactcccaggtctgtatgctcgagtaatccgccgtaaacaacttgagagcccagaccgtcaggaactggagacgagcgggggtagacaggggtcagcggatgatcaggctcgactgtgagaggccgggtcgagcgcaccttcttgcggaaggcgatctgcgggtcgtcgagcgtcaggtcggcgaggttcgctggccgatcgccctcgaagcccgtgttcgccggcaggaacgactgcttggtatacgagaactcgaacaggtggcctgagaggatgggatcgaaagcgggtcaacgagtgtgaggttttggattggcagcaagcgagggctgggcgactgactgtagacgctgtcgacaacgccttggacgagaggtccgacgaggctggcggcagagttgagggcggccgcgtcatcatcggtgaactggcggcgtgaaggaaggttagcggcatgttggccggggcagctgcgcgcggcctcgagctggagcaggtcgcaccccgatgaactgccgggcgaacgagatccggtatgcgaggtccgaatggaggcggtcgcggttgatgtcaatcatggcggacagagagaggggggaatggagtgggctgggttgctgttggaatggagggtagggcgaggagtgagagccgtcgaggcaagccgtgaagggcttgcccttataggccggcgggcgtctcgtcggcgactgaggctgccgcgcaaggaagataagctgacggggctccaacgacgacgtcggtcttcgaagctggaaggaggcggaaggtcggtcgggcttgcgccgcggcgagctgcgcccgggctcttccggccggcccgcgcgggcgcgtctccttcgccggagcgccgtcgtccgtccgccgagcccgctcagacaaagactcgaagcaggccgttgagcccgatggtcgagcggcaaactgggcactcgcgcgtcgagcgcatgatcatgtctgcgcacccggcacaaaggcagaggtggccgcagttgagcggcgcctgggtcgcgtcgctgcgacgcaaggcgcgagtggtgatttgtcagcgaagacagcttgacgcgacggggacaacgcgcgacacggacgacgcacccgtcgaggcagaccgagcactcggcccttcgagacagctttgaacaggcggcggacgcctttgggggcgaggtggccagcttctccatgccagatgtcgcggctgcgacgtcgacgtcggttgggcggtccgacccggcgggggcggcggcggcccactcgtctctgaggctctgcggtacctcctcccactcgccagcagcctcatgcgacggccttgacggcagcgcatcctccctgtcacgctctgcctgccgctcaagccggtcccgctcggcccgaacgagaaagatgactttgccgacgagttccgacttttcgaggacgccgttatgcctgacgtgcgaggcgttgagaattgccttgagcccgccaatcgagagccggcccgactcggccgctagggcgtcatctgagcgggcggtgagcagctgctcaagcagctgagcgccattgaacgacggccgggcgggtacaggtgctggcggccgtggacgagggctggctgcaggcgcaggcgcaggcgcaggcgaaggagctgggcgaggcgtcgctcgtggaggagtcggagccggtgctggagaagggcgtggcgcaggtgatggccgagcgttcgtcctcggttggggtgtcgaagccgatgctgatggctgcgcagccggcggtcgtgcgctggcagtaggcggaggtctgggaacgggttggccggttgagtcgacctgctggacgaaatccttcggcacgctgttatcccggtagtacttctgcaaggagcgcgagtgcagggaattgttcagcgtgatgccagagaagctaagagggctgcggctgggcactgacttcccgggcgggcggctggacgcgggccgggccgacagatcgcaggatgatgctcgccagttgcgacttctcgatggcgcctgcactgctcggcaaacgatggacggtcagcgttcggttccggacgctctggaagcaagggactcacggcagagggatgccgtaagcgcgaaggtagcctgtgagctgcttaactggcagaacgacgagctcctcaagcgtgcttgacgacactgagcagggggtcaagcatcagctgtattctgactcgcgaggagcggcacggccttactcttgagccagggccagcaacagaagcagacggccttgaggtcgtggccgtcctccctcaggagcaaggcctggttgtcgaccgacagatgcctcgtacaccagctgaagccacacgcgtaacaagtcttgcgctgctcgatgagggggatgaaggtaacgttgcaagctcggcaggtcggcgtcgggtttagtggcggtaggccggagagcagcgggagcgacatcgctgccggtgacagtggtcggcctgaaacgaggtccctctcaggagcgctagggttcgctcgcagcggatgaaagcggcccgatgctgtggacgcagagcaggtcggctatgggaggagggagagaaggagggcggttggcgagagcaggtcgtcgtcgacgttggcgggagtcgcaagctgctcggtcgggcatcgcgctggcagctcagccgcccgcaggccaggcgaagatgcccaccaactgccgttagaccaatcaaccctgggagcggctggcaaggagagcctatagccatcgctcggccttctcagagcagctctcgtcctgatcgaggtcgaggggaagcgacgacggtcggccggggctcagcccagcatcctgtcacgcgcctgcccaaatgctcgacgcgtctgcgggacagagctggatcttctacaccgctcgctacaatctgctattttcatgaatggccgatgatgcccagagctatctctcatcgcaccaggcctgtaggccggccctcatcgtcatcagggctacctgctgcggccagcaggctcggtcgctgcttcagaggcagccagccggcgggctggggtgccccagctcgagcaaagccgcaggtccttgagggatgccgtgctcgtcgacgtcgaggcgctcgcttcctcgcatcgctgccggcgtctcgcatgtcgggcgcacgacgcccgggcaaccgtttaggcatcaagcttcgtcgccccttcggcagcccgagcgagtgcaactctcatcttcgcctcgctgaaacgccgtgtttggaagtgggccggccccgcacggggttgaaatcgatgacgcgcggggaggagagtttggtccggcctggcgcgccgcccagagagactgggctgagagctgaaggccgcggtcgccgcaggctctttccctgccccctcctgacgtccacctttctccctctccgacctcaaacgcctaggtcgcagtcgcctcaagcattctttcggcaagaatgtcggcgtgcgtgctttcctctgttgattgacgcagcagcgctcgggcgtcggcttgccgttctcctccctccgatggacccaggacgcgacctgacgttttgcctcttgcctccttctgccccgtcctctccggccaccctacacgcttactcccgcgccatctgcgccgtcgccttcgtcccggccttgccttgccgctgctccgccttgtatgcctgtctgactgtccgcctgtcgtccgcattgcctccgacggactctagctctcgtgagctcctccttctcatgttgacgagcgagcgtgggcttggcctctcgacttgcttcctgctcagacgagttctgacacctctcctgcgcttccttttcctctttcagccgagaaggctacctcggccagtaccgagaccttcaccaccgcgcttgtcctcaacgctgtcattgctgcagtcgagatcggagccttcaccctcatccgccggcgcttccgctcgatctacgagccccggacctacatcccccgggatgagaagtgcgcccgaaggttcagctaggccagctgtgaccatcacctgacgcctctgcatattctgacctgcaggaagcgcgtcggcccgctctcgccgtcgctgcttggctggccaatggccctctggcacagcgaccccaagctcgtcctccagaacaacggcgccgatgcctactgctacctgctcttcctcaggatgatcatcaagattcttctcccgatctggccgatttcatggattgtcctcatgccggtcaactcggttggcacctccgtcccaggcaaccagggcctcaaccgtttcacgttcggcaacatcgcgcccgacaagcagatccgctatgtcgcccacatcatcctgctctggcttttcacctgtcagttcggcgtgcaagaaaattcagacccgaccgtcgccctcccctccgcacggcagtcgccggggcacaaaaggcctagaagctgaccccttttctgtcgtcgtgccaaacaaccagtctggatcctttacaacctccgtgaggccatgaaggagtggatcatcatccgccagcgctacctcgtctcggacgagcactcgaagctgccccaggcccggaccgtcctcttcaccggcgtccccaagaagcgtgcgtcttggtcccgacagcggcctattggcctgcgctcttagcctggccccgagctcacccgccctggcccctcctacagtcctcgatgaggagcggctcgagcagctcttcagccacattcccggcggcaccaagcacatctggctcaaccggtgcggtatcgtttgctcctccgcgtttcctcggtcgctcgatgaccactgatgccattgcccttgaccggcccctgcagcgacctcaaggacattccggacgactacaacaaccggctcaaggcgtccaagaagctcgagtcggcgacgaccgcgctcatcaagacggcccaaaagcttcggctcaaggccgagaaggcggcctcgaagaacggccagcctcttgaagacaagtggacggcgacgccggctggcaccgaaaccgagggctcgatcgccgagcggctcgtgcccgagaagaagcggccgacgcacaagctcccgacgcccaagtggatgccgttcgcgctgccgttcaccggcaagaaggtcgacacgatcaactggtgcaaggagcagattgtcgagaatgacaagaagctcgagagcaagcgcgagcagcttcggcgcgacatcaagacgcccggcaccggcgatgatgaggcgtacccgcccctcaactcggcctttgtcctcttcaaccagcagattggagcccacctcgcctgccagtcgctcattcacaacgagccttacacgatgaacggccgttacatcgagacggcgccgtcggacgtcatctgtaaattgcgctctcgtcgtcgctgcattacagccagtgcagcactgacagccttgctttcttgcatttcgtcagggagcaacctcggcatgaacccgttcgttctagcgctccgcttttcacccgtcgcgcctttgactgactgacttttgctcaaccgacggctgcctcccagttacgagcagtcaattcggcgctacatctcgatcgccatcacgaccgtcatcattctcttctgggcgatcccggtcgcctttgtcggtatcgtctccaacgtgccctcgctctggtgagtcatgtgccacccggaccgtcgcgatcatcagcccttctgacctaactctcgttctctacagcctgcaatacagctggctcgcgtggctctgcgagatcccgaccccggttcccggaatcatttccggtgtcctgccgccggcgctgctcgccgtcctgttcatgctgctgccgatcatcctccggcgtacgttccttgagtcttgtgacctgttgcgccgaagctgactattgtctctcgcgcatgcagtcctcgcaaagtttgagggcattccgaagcacacgggcgtcgagctctcgctgatgacgcgctacttcatcttccttgtcatcgtgcgttcgcttctgcttcaactcgcggacgacggtgtgctcaccctcttttcctttcggctcgtaacagcacggtttcctcatcgtcacccttgcctcgggtctcatcaactcgctccaaggactcgccggcaacccctcctcgatcgcgacgatcctcgcccagaagctgccgggcgcgtccgtctttttcctgacgtacattacgctgcaaggcatcgccggctcggccggcatgttcatccagtacgtgccgctcgccatctactacgtcaagctgttcttgctcggcagcacgcctcgcgccgtctacaacatcaagtacacgatgcgttcgatccagtggggcaccgtcttccccaatacgacgctcctcgttgtcatcagtgcgtccgacccctctgccgaggttgtccctgtctgcgctgcgctgacgtccttgactttcatcctgcagcgatcgcctacatgaacatccagcccgtcatcaacggcctcgcctgcttcgcctttgccctcctctactttgcctacaagtacctcttcacctgggtctacgagcaggagtgcgttcttcccctttcgcccctcgcgagcattgagaacgtcgcctgactttgctctctcgcccccgctcgcagccctgcttccgacaccggcggcctcttcttccccaaggccatcacccacgtcttcgtcggcctctacattcagggtgcgtcgagctgccagaccaactacgcgccgctgcggctgaccaagtaacgctcctctatatcgacaggcatctgcctcaccgcgctcttcttcctcgcccgcgatcagaatggcaacttcaaaacgctgccagagggcatccttgccatcatcctgcttgtcatcgtcgtacgtcttgtccgcgggcgttgatcagcttaccgcctgcgaaacttgctgaccatctcctgcctactaccttctacagctcggcttccacatcatccttgaggactcgtacggcccgcttaagaaggccctgcccgtctcgctcgcgcaccggtcgtacggcatgccggtcgagaagggccacggctcgtcgctcaacggcgaggaggaggacggcatcaactcggacaagcagccgctcaacccggcgaacgctggccggggcatggccgccaactacgtcgttaacggctcgggcgcgccagcgtccagcgacggaggcgcttcgctcggccagccgaccaccgtcggtgctcactcgcacgagggggcgccgcaggacgacattgagctccgccggcggacgacgcgctcgaccgtcgacgaggaggatctcgtcgagaacaacggccagcacaagcagcacggctttggccactttggcaagaagcacggcaaggacggcgtcaaccgccacgaccacgccgacggctccaacacgaacggcaccgcgaccccttcgagccgcgaggaggccgagatcgaggcggcgttcacgcacccggccgccaagctggagcagcagacgatctggatcccgcaggaccagcttggcatcgccgacgaggctgtccgcgactaccgcgcgcgcggcatcaaggcctcgaaccgaggcacgaccctgaccggaaagggcaaggtcgagatctccgagggcccgcccgaggaggacatcgaagaggtctagaaggcctctgcccgctttcgcctttcttttttattactaatgagacccccccctatgctctcgcgcttcgtttctccctttcctcacccgctctcgactatttgacgcccgctcgcgatgctctcccacacgctataacgcgcgccaccctggcgctggcttccctctcccagtctactcgataatgccatgatacacgtgccccttccaggtcggtaacgttcggaagaagcgagcagcccgagaccaccgggctttcacctcggcaggcagagcgaccatgctagcagcgtcgcaagaacgctagccggtcaagggccatctcgagaggggctgcactgggtgctgctcgacagccttgcgcgaggctgtcgtcagaggccgagtgagggccgcagagaggcctgaagaggcgccagcaagctcggcagctggtcgagcataagcgagttgagccgagaccagcgcacgagaggctcagcgcacgcgcggcgggaacctcggccggggcaagtcctcggccgcgggcgacgagtggtagtctgggccagcgtacatcgcgccggcgtcctcggccgggagcgaagcggagcgcacggccgccggcgcggatggaggcaggaggagatgaggcggcagcggctttgaggcaagctggctttgggcagagccgaggtgagagcttgtcggcaaggacgacgctgggtcgacaccgccgcctgtcccgccacgttggcgcttgctcctcccgccgctagttttggctgccggcgatggaggagggataatgttgagcacgccggcaggaagagaagctgtcgaccggccggcctgagtggacgttgccggcgccctgaacagggcttgctgccaggtcggggcgtcgccgcctcctccgccgccgtgcgccgcctgctgctcggcgagctcgacaaagggcgcgtgctggcccggtaccggaggtgccgatgcggcggatgcgggcaagccgggtcgctgcttgcgggtccggccagagctgcctgatccgctgcctttgggttgcggcgaggccagcgtctgctgccactgccgcggggacgaggaggcggagggtcggctcagccagcgtcctgccatcgaccgccggacgggaagccactgggctcaaggaggcaaacatacgttgagggcctctttgcgttcgtcttcgagtgcaggcgtctcccagacgtcgccttcgtcctggctggtcgagtgctgctgctgctgcctactgggcgcagcctggccgccggtctccttgcgaggggtgcgagaccgtccgccgccgccgccgccgccgccagatcggttgcgccgacctgacctgcccgagccggtcgccgtcgctgcgctgtcggcagttgaggatgatgctacttggtccatcgagcgagatgaggacggaagatatgcgtagagcgagtgagtgttggcaggctgtcgcacactctcggcctgccgccgcgtcgaggcttcggccggccagcttcccctcgagccgccatgtcctcctgaccagatgagctcgctcagcgccttcggctgctcgctgacatctcgctcaagactgtcaccggcgagcaggccctgccttgtaccgcgtgctggagacgagcgaggtggcgtccggcgtcacgcccgtcggaagcgaccacggcgagctcgacggcggccagtcgacggccaaactccccacgagacggccgcccttgatgagacctgcctgcaggctggatcagccagccgccgtgcccttcaacactcaccttatctgcactcctcgcccatgtcggacaagccgcttcctcctcgcccaacggccaatagccagcgccgctcctggagagagccgcctgcgttcgggcaggacgacgcctggtcgtcgggtccgagctcgccgagtgcgttcagccccgcagcagccttgccccagccgcaccctctcatcgaccggtcacctcgctgacagctcttgcctctcctctgctcggcagcatccagtacgacgtcgttcgatcttaagggttcaaatctcaagtcgtcgaccaaggtcggcgaggacggccggcttcagctcgacctccgctttgcgaagctcctgcccgagctcccgcccaactacgcgaacgacgttgccgaaccattcatcgagaaggagcccgagtccaagcccggctccaacaagtggctcggcgtcgttccgaatcttacgatcctgatcatgctcgtgggaagccgaggtgcgtgttgccgtgcctgtcgaccgcgggtgacgccgagctgattgcttctcaatcgcttcatctccctcgcggcaggcgacgtccaggtgcgcctcgggggtcgagagcttctgcccgcagcaagcgactgacacccttctgccttctgctcggcgtttgtagccattcctcgctctctccctcgctctcatcgcccacggccaccgcgtccggattgcgacccacggcgtctttgaaggctgggtccggtcgacgggcggcggtcagatcgagttctttgacattggaggcgatccaaaggagctgatggcgtggatggttaagagtgagtctcgctgcctcagctgaactgccgcatcacccggagctgactcgcaggccgtctccttcgacagacccggggctgatgcccggcatggactcactcaccaacggcgacatcggccgcaagaagaagctgctgtctggggtgcgccgccttggacgagctgtatctgacgatgagcactgacacacctcttctggctgtccagatcatgcacggctgctatctgtcgacgcacatgcccgactcggtcaccggccgctcgttcacgcccgacgtcctgatggccaacccgccgagcttcgcccacatccatctggccgaggcctttggtcgtgcgtcctgccgctgcttcccagcactctgttcaatgctgatcctctcgtgcgaccggagtgccgctccatctgaccttttgcatgccgtggaccccgacggtcgagttttcgcacccgcttgttaacgtcaagagctcgacggccaagccgggactgacaaactatctctcattcggcgtggcggatctcttcacctggtccgggtgcgtccctccaacctgcaggcgagccgggcttggctgtttctgacatgcgctcctcctcgcctgcagcttgtcgggcatcaccaacaagtttcgtcgcaacacgctcggcgtccctcccctgacgggccagtctggcccgggcgtcgtcgaccggctgcgaatcccctacacctactgctggtcgccgagcgtcatccccaagcccaaggactggcgcaacacgaccgacatctcaggcttctactttctggacggcagcacgggctatgagcctccagccgagctcgacgccttcctccgggcgggcgagaagccgatctacatcgggtgcgtcgcgatggccgagcgcagccgtcgcagacttgtcgctgatggccacctactttcagctttggttctgttcccgtctcggacccggcagccatgtcggccatcatcttcaaagctgtcgagcaggctgacgtccgagccgtcgtctcggtcggctggggcggcctcggcggaatcgacatcgacccgaagcgcattttcctcttgaatgacacgccgcacgactggctcttcaagcacgttcgggctgtcgtccaccacggaggtgcgccagctcttcgcctctggccgctctcgcagaacgcctgaccgatgagcgagccgctgcaggcgccggcacgacggccatcggccttctcaacggatgcccgaccggtgcgcctcgctaccctcgcctcatctctccttcaaggctgacctcgaggcccgccctcctgcagtcgtctgtccgtcgatagtcgaccaattcatgtgggccgactttgtccatgctgctggagccggtccacctgggtgcgcccctgctccttactcgacgctccgcccgtcggcgcgctgactcggcgcccgcttactgcctttagaatccccctcaagactatgacgaccgagaagctcgtcgaggccctgcgctttgtgtgcacgcctgactctgctaaagcagcgcgagcgatgggcgagaagatccggcacgaagtcagtctgcgacgcctctaccgcgctcggccgcagtcggctgaccatcgcttctgctctcctctcctcaggacggcatccaggctggcgtcgactcgctgcaccggcatttgcctttgatcaacatgcgctgcgacgtcgacccctcttgcgtcgccacctggtgtgagtctgcgcgggtcatgcttgacgatcaatctgcaagctgacggtccgcatcgccgcttgaagggtccgacactctgtgcctccggctctgcccgctcgccgcccagacgctcgccgacgctggcaagatcaagctgtcggacctcgaggtccatcggccgaaggagtacccgacacgcaagcaggcgaccgacccgatctcgggcggagcaacagctgtccttgccgttgttgcggtaagtcgacgggctcaagtcttctagctcaacttgatgctgacctgcgctccctggctgcagaactacacgtccggcatcgcgcagatcttctacaacccgcccaaagggctgctcaactcgacgaccgccatccctcgcgggatcatcgacaccctcatcggcatctccgagggctttggcaacctgccgaagagctacggtgcgtttcagggccctcgagagaaggaagggccggctgaaagctgacttgtcgtctttcaggctccgaggtccggaccgtccacgaccgagacgtcaccggcttcgtgtcgggcctggaggagggctcgaaggtgcgttgcttgtgacctgcagtctgtcaatctccttcattagctgacccgctcgtcgtaatttacaggccctcgcgtacggcatcaccgactcggtcgcaggtttggtgatggagccgatccgtggcggcaagaaggagggcgtcgtcggcgttgcgaagggtgttggccagtcctggctgaacctcgtcatgcggccggccgcgggcgcactcgccctcgtcgcgcttcctgcccaaggcccgtcgctcctgcgtctgagtgtttgtggcgtccccttgctgacgatgttcttctcccttcgcaggcgcgctgcgcaagctcgagggcacaaagtcaaagcagctgccggcgatccgcgagatccggctcaaggagggccaggacgcgtttgccctcgcctcggccgagaccaagcgccagatcctcgccaagttcaaagagctcgagggcgggaccaaggcccggcgcaaggcctacaaggctgaattctggcgcttcgtgagtcgaagcccggtcgtttcgctggtggatctgcagctgacgctttgtcttctctggcagctcggcaccaacccgcggaagagcgaccgcaagggcaagagcaaggaggacgagctgatcgccccggcgccgctcggcctcatggacgggcctgacgacggcgaggacgacgaggacgccgacgtgccctggctccagccgccgggctacggcgacgtggcagacgtcgagcgtttgaactctcttccgagctcgcagcaggcctcaccctgcggctcgcgaccgacctcccctcgcccgacctattcctgaattcgaccgataacgttgaatatgccttgaggcccttccgtgacgaccttgactatgaatgcctgcatcggcacctgcatcgcctcgagcagcgcgctggctgaacgttgagctggaaggcgatgagcagcaacgaccggctggagcttcgcccgcccgctcgctctctcgcacggtcgctcgagcgcggctttgaagacacgcgtgaggacgcatgagaggggcggcccgccaaggctccgctgctcaaagggagcgatcgagactcgatcggccccgcagccgccgtctcgctgcaaagagccggcaatttcttcgagcaagaagctgcagaggctgcaaggcgggtgtcgctgctgccctagcgagacgaccctgagcgagcttccgacatgcgtctcatgtcgtacagcagcatcgaaaaggaaaaactcaagctgtccggcccttgcacgccccgaccgcgtgcacgtccgagcaggctctaaacaggcgaaaagtggcgctctcggaggctgattgttgcctccgaaaggccccgctgcagccgcgcaggcacgttctctctcgagccccggtccgccgagccttccctgcacggtcgtctggtcggcctcttcgaaagacttgaagaaggcccgaagctcgtctgacctttccttctctcttctctcgtccaaccaccagccactcccttctctccttcccctcctcccgctcgactcggcaagctttctccaagatgcctatcgctcatcagtgggagtgagtccctccctccgacctatccttccagtcgcgccggccggcccgccgcccgcccgctcgacctgtcgcaccgtttctcaggcactgacgaactcgccggccacactttgcagctacctcttcgccatcggcaccatgttcgcgttcctcgacgcgtacaacattggtgccaacgacgtgcgacctgctcttactgcgcggtctctcctgtcttggcgagcgtgatctgactcttttgccgttccctccctcaggttgccaactcgttcgcgacctcggtctcgtccaagtcgctgacgctcaagcaggcgtgcatcgccgccgccctgtgcgagttcctcggcgccgtcctcgttggcgcccgggtcgcctcgaccatcaagaacggcatcatctcgctcacgagcttcaacggcaacgccggcgtccagctccttgccttcaccgtcgcgctcgtcgtctcggcctcgtggctcatggtctgcactcggctctcgtggcccgtctcgacgacttattcgatcgtctcggccctcgccggtgtcggtgtcgccgtcggcggcgcggacgccgtccagtggggctggaacggcggaaagggcctggcgacaatctttgccggcttcatcatcgcgcccggaatcgccgccggcttcggcgccatcatcttcctcctggccaagtacctcgtcctcgagcgcaagaacccgatgaaggcggccttcatcatgggccccttcttcttcttcaccgccgccgccgtctgcaccatgtcgattgtctacaagggcgcgcccaacctcaagctcgacaagctctcgggcgaggttgttgccggcgccatcgtcggcactgctgccgtcgttgcccttctcgcggccctcttctgggtcccctatgtcaaccagaaggtcgtccgcaaggactacagtgcgtcgccttttgacactcttactttctccacttggtcgctgacctcacggtctctttctctcgcagccctccgcttctaccactttttcctcggccctgctctctggtggcgtgaggcccccgccgatgctggccagatcggcactcccgaccacgtcatggactaccgcgtctacaaggaggaggagaacacgcccgaggcccttgaggccgccgccgctcgccggtccgactcgctcaacgatgtcaaggagcaccacaacccggatgacatcgagtcgacccctcctgtctcgcgtcaagaggtccccctcgccgaggtcgaggatgagagcaagcccgccgtcggcccgtggtacacgcccaagaacctcatcctcaaggtctggaagattctctcgcacggaacctcgagtgcgccctggctcttcttcagctctgccctttgccgtttctttcttgctgacgtgcgctcctcgccccccaccagtcgacatccacgccgagcagaagaagacgtcgtccaactcggccgccgaccggcttaaggcgatgcacatggccgccaagcagtacccgtccgaggtcgagcatgccttctcgttcctccaggtcctcaccgcctgcacggcctcgttcgcccacggctcaaacgatgtcgccaacgccatcggcccatacgccgccatctactgggtctggagcacttcggagcccctttcaaagaacacgccgacgcccgtctggatcctcgtcttcggcggcgccgcgatcgtcatcggtctctcgacctacggctacaacatcatgcgtatcctcggcaacaagcttacgctgatgtcgccctcgcgcggtttctcgatggagctcggtgccgccatcacggtcctcctcgcctcgcagtacggcctgcccgtctcgacgaccatgtgcatcaccggcgcgaccctcggcgtcgccatggtcaacatggacctcaaggccttcaactggcggacgttcggctggatcgtcctcggctgggtcatcaccgttcccgtcgtcggcaccctgtcgggttgcctgatgggcatcattctcaatgcgccgcacttctgatgattttgaacgtgcttcttagcccttctttgttatagacgaccgtgcctccttcgacggtttccctgccttctctcatctccttctcaccactcttggcccgctcagccttagtaatctagtccccaccctcgctccctgcaatcacaatcaacaccctcactctttttcctgcgggccggcaggaatatgtacgcctcttcatgacttgcacgagactcaccaagacgctcgtaatgagaaggagtggccgtcacttgcgctgcgcgccgacattgacgacggccagcgaccatcctccaacagcatcgccccagactccggtgcaaggccggcaggccgctctcagacgacctcggatcgagaagggcggggcgagagaaacatcgtcgtcttatcgggcctcgttcgccagcagcaagacgtcaaaagaaggcgaccatcctagagcagtcaaccgacgaggccgacgagggcctagacctgctggtacgacgtgctcgatttgctcgaccaggcccgctctgccgtcggcgtggccatcggcgccaggccgtggctgtctccgtcgccgtgagtgctggtcttgcctccctgatcgccatgcaccttccgccttagctttacacgcgcagaaagaggcaggcgagccatacatctcactcgagcccggccttgacgcggtcgcgcttcttgcgccgacgctcgagctctgcgcggttcttttgcttctcgccgaagccggcgtcgtggagggtcatggcggcaacgcgctttgccgtcgagaccttgttgagcgactcgagcaccttggcctcgggcagcgaaagctcctgcagctcgacctctgcgaaggtggaagttgagtgtcagccaaggacgccagcggcagtaagaagcgagcaactcttcctactcactgatgccttcctcgatccgctcgacgtgctcgacgtcacgctccgtcaccatcgtcaccgcaacgccgccccggccggcacgggccgtccgaccaacgcggtggatgtaggcgtcaggctcgcgcgggcagtcccagttgacaaccatcgcgacttctggaatgtcgagaccgcgcgagccgacgtcggtcgcaacgaggatcgggacggtcgccgcccggaactgggcgagcgaggacagccgctcgcgctgcgagaggtacgagtggagcgggaccgatggcaactgaagctcggtcagcagcgcgtgcaagtgggcggccgtcgcgcacgtctgcgtgaagaggatcgtcgacggcggccacggcggcgtctcgtcatctgggtcggccgtctttgcccccggtgccggccgagcgaggtgggcgatcgactcgggcggattgagaagcaggtagaagaggtacgactcgcgaacatgcgatgggataaagaggtagtgctgcttgaggttggcaaccgtcaggtggccctcactgtgaggcaaacggcgcatggtcagccttagtcgaagtacggaagacgcagcatcattacgcacggcgtctcgacacgccggacgacgatcggctccttgcccttgcgcggcggcttggctgccaggccccgaatcgcgtcgctctcggtcgccgtgaagagaaccgtctgccgctcctcgggcatgcgctcgagtaggaaagcgaggtcagacgcaaacgtcggcgtcagcatgcggtcggcctcgtcgagaacctgccatcggaagggcggtcagcagggcaatctgtgagcagggtgagtcgcccgactcaccagcgtctgaacacggtcgagcccccactcgccgccgctgctgccgagcaggtcgcgcagccggcccggcgtggcgacaacgacgcccggccggtcccgcagctcacgcccttgctgaacgacgtccatgccgccgacaacgacgctcgtccggacgccgagtgggacgccgacgacgtgaaactgctcggcgatctggaacgcgagctcgcgcgtcggcgtcaggacgacggcccaaatgccaaatgggtcggcggcgatccgctggaggatcggcagcgcaaaggcgagcgtctttccggatccggtcggcgagatgccaatgacgtcgcgcttagtgaggattgaaggaatggccatcttctggatgggcgtcggctggcggatagagagcgtgccgagcgaggccagcagctgctggctgatgccgagcgtcgagaacgtctcgggcccgtgcggaacggccgttgtcgtcgtcgtcgtcgctaggtcttctgcctcctcagcttcgcctgagctcgctcgaggagcaggctgaggcttggagggcacaaccttccgtggcgcaggtgtacgcgaggggagagccgacgcccgcgaggccagcttgacacgcgacggcagagccgacgtcggccctgacggcggtggcgagaccgagaccgagatccgacggcgggatggtccctcgtcaaagttgtcgtcgccaaaggcgtcaccctcgctcgagcctcccgagtcgctgcctgagcccgagccggaggggccgacgctgctggcgtcgtcgtcgtcgtcttcttcggcagagacctcatgcggggactcgactggggctggcacagcagctcttgccttgcccttggcggcaagcttgacgcctgcgtcccttgtcttctggcgtttggccgtgggcggcatcgtgcagaggttgtgggaggaggaaggaaggatgagggaaggtggtcgggacagcggctgctgcccaaattcgtctggctggcctgtgggcgactgcgcgcgtcaagagaaccaaaaagaacacagttcgaagtatgattcgaacgaatgatttaccggttggagctctaccattgaaactggtggccacaaagaaggaccattatataagagcaaaccaacagcttacgcctgtagcgccaagacctgcgcggcatctcgccggcccctcgaccgaccaattctgcaccgtccccaggcctcgctggccctctcgaactgctcctgctcagctcatagggtccattctgtgtcgtagccgcgcccccgaaaggccagcgctcgtccggccgcaagcggtaaggttggcccggctgacgtcgcctgccgcttgcaaggcctgccggcttcaccctccgcagctggccttctgctgacagcgccctcgacctcgacgacggctcgctacgatcacaccggccgccacctgccttcctgcccgaattgacatcatagctgcctgttgactcgaccctcggcggactcgtgcacggctccgctcccaagaaccagacgaccgacgatgacttctgctccggtcgacgcccgagcctcgagcacctcggcggaggacaagccgagcagcatcgaggcggacgtcgtgctgactgagcagcccgtcagcggtctccagggctggcagaaggcttgcctcttgatccctttgtgcttttgtccgtccgtttcatctttcgcgtaccagctgggggcgcttgactgacccgcacggcgcgcagcgcagttcctctcgtcggcgatgatctttgccatcttgtctggccacctctcgcgcgctgcaggatccttcggctccgcaagctgacaaccttgactggcgtgctccgtctacagcttggcgacgcccgccatctccgcctcggttggcctcagctcgcgagaagtcctctgggtacgtgctctcggccggtcgccttacacaatcctttcacctgacattgcccgtctcctctccaggtcgtcggctcctactccatcagtcagcctacagtgcgctcctcccgtgtcaggcttgcgctgaccgcccggcaccaccagactatacgtcgtttctcctgcccgccggcaagctcgcgaccgtttgcaaccccgtccccgtcttcctttgcgccttcgttcgtcgcctgcgctagcttgtttgcaaaagcgccatcctggcgtctgacgccgcaattgactacaggtcatcctcggctgcatcgccctcggccagagcttctgggacagcggtgacaagtttggcttcctaatcctcaatggcgtcgcaggcgtttcggctgccctcttgcaaccgacgtgtgagtctggcgtcgctatcgacctgtggctgagctctgacaaccgctcgccacttgtcacagccgtgcggatcatcatccacctccaccaggacgacgcctcgcagaagcgcgccctcaccctgtgcgtcgcttgtcgcccactcgcaacacctcacgggccgtgctgacaacctccaattttcagcttcaacctctctgccccgctcggccagtcgctcggtggcctcctcgccggcattctcctcttgagcagctggcggtggatcttccgggctgtggccattgccatcctggtccaggcgctcggagcgctctgtctcctccgcaaaatgcagccgctgccagcttaccagcgtgcgccgggcgagggctggtgggaggcgctcgatccggtcggtgtcctctcgctcgttgcgtccatttacctgccagtcgctgctctcttcaatggcaccgccgtcggatgggcttcgcgcgagttcatcatcccgctcgtcgtctcgatcgtcccgatggtcgtcctcgttgtctgggagtggcgtcgagacggcgtcaacgttcgtccgcctgctatctctcactcgaccttctctccgagactgactggtcggcccgcagacgatcttcccctggcgggtgctcaaggtcccaaattttgcgcccctttgcgtcctccttctcggcccgctcagctggtggggcgctccagcaggtctgtcgacactctgcaaccctcatcgtctttgcttggccaaccttttgctccttttgccctcgtcagcgccgctcagtagctggtaccaggtcgtcttgcgccaatcgccgctgtcgaccggcttacatctgtgcggcgcccaccttgttccttcgcagcggcgctttgctgactccctgccgccgtgctagattcccgatgggcgtgacagtcatcgtgctcgcgctcctgatgacgactgccgtcccacagctcctgcgctagtgagtcccttcacctctcccctccttgtcgatcgtcttcctgatcctcttgaccgtcgtagccctaagattgtcgtccccggcggcctcgtcctcggcatcggtggcctgctgctcatttcgttcgccgaaggcaacgtctactggcggctggcgttcccaggcttcatcctctactcgtgagctcccctcggagtcagcgcaagtatgcccatgctgacgtccaaccctccgcagcgccggcatcacgttcgccttcttgccagcctccatcgccctcgtccagtcgtgcgcgtcctcgttcgtcggcttctctggctcgctcgtcggcttcttgccgcaactcggggcgatcgtcggcgcgacgatccaaattaccatcgcccagtcgaccggccctctcaccgactggtcgtcgacgcagaacagcttgtggtgagcacggatgactagtcgctggcgactgtcagtgctgacctctgccgattcgctcgacccttaggttcgtcttggcctggatggcggcttctggtgtcttcttcgcgatctttttcgaccaagtcaaggcagcgaaagcctgccgctcggccgagagcgcaacgcctgctccaactttgaacgtcccactctagcatgcgcatcatcatccatcgtccgccgcagctgctcagctccggccgaggttcttcaaccggccatcgacgaagggtgcgacgacagcgacgtcgtcttcgagcgcgcggaaaacgtcgcgcgtgcggctttggacgaagaagttgatggtgcagtcgtcggcgggtgatgatggggccagctcggcagccatgggcttgtccttgggctcggtgggcgacttgggcggcgacaaggggccgtcggcggtcgggcgggcgggcgactggaacttgcgaaggccctcgcccgactgcagaggtgggagcagtatcaggtcagcttgccggccacggctagacgtccacgacgcctctatcagcacgcacgcattcgtcgacctggagaaaagcgacgagtcagcaaagtcaggcatcgagcggtcgatggagcagacacacctccgacatgtgctccttgcgagcgacccggagcgcgttgcggacgcttcgccagctctggttgacgacctggctctcgttcgggagccggtccttggcgccgggctcctgccagctgagcgcaccctccgtcttagacgagaggaaatcggaccgctcgggctcggcctgcttttgctgctccgcctcgagctgctgccggcgcttcatcagccgccttttccttgcgatgaaggtcgagccgaggagaaactggcggataatggttgacatgatgagcccgctctcgtcgtcgatgagcatcttgccgtctttcatggcctcgaagccgtcgtagccgagcgccatgtactgagaggtgggtcgcgtcggtcagcccgggtgccagagcaatgcaggcttcggcgagagcgcacctcgcgcgtgacgaccgtgtagagccgcccgcccttctcgcgcttgatctcctcacgcttgccccggccgccgagccggacctcgacctcgacgccgtccttcttcggatgcgggtagaactggacggtcgactcgtcctcggcggcggcgtcgttttccgactccgagtcatcgggagtcgtcggcgccgtcttgcggccgccggcctttgaagtgttgcgccggcgatgatgatgcgagacgagataaaccgacttgacacgctggccgggcggcacactggtgtcggcgacgacctccatgccggcgaagatcgggaagcggccctcctgagccgggtacttgctcaatgagctctccaacgccgcccaaatggcctcgccgtcgagctggacgacgacgatggcatcagtgaacgggagaatctcaagtacgtccccgagagtaacaacgccgggcccgtaacgcgagtcgccgcggatcgcgccgccgcagaggaaaacgatgtcggtcgagacgccctttgcctcgagggcgtcggcgtacgagtgtagcatgacatcagccatccagttgccgacagcgctctcgcgcgtgcctgcgagaaggggacaagtagagggtcaacaccgtcgagtaggctggccgacagccggtcacggacgcgacgcacgaacgatctcggaccggcaatcccactcgctgacggtaaagcacgccggcttgtcaagcgtcttgccaatgtccttcagcaggccgtcgatgaggtcctggacctcggggttggtcggcgaatcgggcgtgatgtcgagcttctcgccggttagcgagcggacgaggtacttgcgcggggatgagccggggtaggaggggttgagctcgagcccgacagtaaagctactgcaggccctgaagtcggtcaggctcttgacaatgctgccggagggagtcagatgggtggtcagcgattgtagggctgagccggccgttcttgggcctcacaggcagtcccggtcatcctcggtgcccggcagatcgtccggccggtcccaattcttccaattatcggttcctcgaccgatgtagtacccgtgatcgtgcccgcctaagattaaatccaatccttctggtcggtcggtgtcgtcttcggtccacttgacggcgccgacgtcgttggcgagcttgatgtcgttgcccaaccgcgaatgcgtcagccctacgacaaggtcacatccgagctcaccgcggagcttggccgacagctcgcgcgcacgctctgccatcggctgatgcttgaagttctcggggaaggacgggattgtcgcaatccagtcgccctcgacgaggccaaggaggccgatcttgaggccgcacttctcgacgatcaggtactcgtgcatcggctcgggcgtcttccccgtcgccgagttaattatgttggacaaaagccctgcagagcgtgggcagcgttagcgaggttcgtaagcgttccgggcgccggcgacgcacaagggaagttgaggtcggcgatgagcttggtcaagtgcggccagccgtaatcaacgtcgtgattgcccaagcaggaggcagcgagatggaagcgattcaggagcgggaccatgtgcgaccctcgagtgatcctggaggaacgagcggcaagggcggcgtcagcggcggaggacgcgcgcgactgccgggagcgaacgagctgacgtcgattcgacgctcggcgagaagacgtctgatagggaaagctcgggtcagcctgggaatgcagagctcaagcgagagcatctgacgacctcctgagaacagcacgaggccctccttcccgccggcctcgttcggcgtatcggcccagccgtcgcggacgtcgtcgagcgtgcaggcaaactgcgcggccgagatgtagcgtggcccgctctccagattctcgacgccgtcctctggaacgtagcgctgattgacgcggtagacatcgttgaagctggcgagaaagcaacgggcgttcgagcgagcaaaggagccagtcagtgagacgaagcgacgggagcaggctggcggcggcaacggctaggcgggaggagcaacgcactggaggatcggcagctcaatcatcgcgcgggccagcttcagggtgacagctcggggaggtgcaggtacaagaggagacggaagcgtcagagcaggctgtgtcagaggagcaggtcgttgagaggggaaggcgggtaggtcagagtcagaagggcgagagatcgtcgctccgacggcggagggctgagcgttctgctgccctgaaggcagcagaagctcgggccctgcccgtctgacccgcgagtcctgtatctgactgagtcccttcgctcaacaagccgtgtcggtcgtgttcatgctgaggtctacacgccggtctcttgcaaagcccttcagctgactgaccaagttactgatgcagcgactggcggtggtcgcgcacgcagaatacgcgtcgacgcccgccgcttcgtttctcgcattcgaggaacgcgtcatacagagcagcttcaacctgtgaccctcagcgcgaggaaacgccgtagtaggcgagtccgccgagagagccgccaagaatcgcacccggcgccggcagcttgaaccactcgacgaaaacgaagaccatgccaacgatcgatacccagaagccgtgcgtatcgagagagaggtagacggccggcacgtctgggtcagagtcgtccgagggcgcaagaacgccgatgtggaagaggcggtagacggcggcgtagatctgcgacgatgaaaggcgggtcagcgcgcagggagacgaagagagaaactgctcgcgacgcacgagaccaatggcggcagcgttgagcccgcggaggatactccttgtcgtcttgcttgtccgccagcggagatagagcggtagagctccgaccttgaggataatgcccggtgcgaacaccccgaggaaagcgagcagcgcgccaatgaggggctgcgtcgggaaagccagcacaccgaggtagaccgcaaagttaaacattgggcccgggctcgctgatacgagggcgaggccgatgagaaagtcgcgagggagaacccagcccgggttgacggtggcgctccgcaggagcgggacgacgacaggtccgccgccgaaaataagcgtgccggcgaggaggatgttggtgaaaaagtcgagcgcttgcgtcggagccttgacgaccgagcgggcgacgacgatgctgatgaagaaggcaaggaagatgccgcagctggggatgcacgggttagccccgagtactcgactttgcagtagacagcagcactcacagcgccaggccgcccctcacgctaagcttgaagtagagcgacgggacgaggttcgcctcttcttccgtcgattgcggcggctgggaggacgagagagctgttggcgagccgccagccaagagcgtcggcaccgaccgcagagcgtcggagacaccggcagcggaaacgtcgtcttggtctttgtgcgtgggcaagtcgacggcagccggaggaacagtgtcagtcgaccttacgtccgccgtcagccggtcggactcgttggccttgcgccggacgacaacccgccacttgcggccgaggcgcgagcgcaggccggccgagatgtcccacagccaggtggccgagccgccggcgaccatgagcgctgggtagagccactggctctcgtagcaggagccaatcgagccgctcaggaggacgattagccgggtgactgggtccgtgacgaccttttgcgagagcgtataggccgagtgggcgatctgagcgcaacaaacgagtcagttgactggccttggttcaatctagcgcgaaagagcaggacggacgagaccgacggcggcactattcaggccagagaagagtgagtagacgatggcgggtagcgccgagggaagcgaccggatggcgaagccgaggccaagcataagcccagcgccagggccggcgagcaggaagaaggagagcagcgcagggaccatgccgccgcggaggagcgcgattgagaaggccagttgtgaaagcgctgggcccgggagcgcatttccaagcgcaagcaggtcgatgaaggtctggtcgtcaatccactgctgctgatcgacaaagatctggtcgggtagcgagtgcgcagcagagagtcagcttaggagcggcaggggggggggggggggtcagatgcgggtggtgggtggggggagcgggagggagagatggctgttggaaggtcagagcggcggccctttcgctgcggggccgtcccaccaggaattttggctccgacgccctccagaaccgcccaacatctgactcgctcgacgcgtcgcccacgatgctgtcgtcgggcgtgacgctgactcctttgcagagaggctgctggcttgtgcgttgacgagcctttgcaaaaccagcagcagcctgcggtaggcgtctcgcggactctccgaccgagacctgccctcttcttactctgccctgatacgcagcgtcggccgtcgtcaacacgtagcagctgctctctctccgcgactctacagtcagcccagctaccggctgactgtagttagctgggctgactgtagcattgctgacctgttgcaggcgagcgcgagaacgatgccccgcggatatctggcaaaagccagcccagaaaacgacgcactggcagcagcggatcgaaggcgttcaatcggccaaggctgtggaccggggaaagagtagagagatatcggccaagctcgataccaccctcgacaacgctgtcagcagccactctgacctcgttgacgaggaggcgaagtggctgcccaagccggcgccttacgcccctcacgacgtccccttctttgtcctcacttgagccaacgaacacatctctgcgtcttctcagcctcgtcagttgctgcagatctcgagccggatcatcaccaatggccaccccgcataaccttcattctctcctcgcaggcacaacctcttgcgtctcgctcctccccctctgcatacacgaacgcctcgctgccctcacatttaccgcccggcgagcgtccctttatcaatcctgcttcattatcgcaagcacctttagtccctcgctgccgaatggccttctggccagcgctcgtcgacaggtcttgcgctgagcgactgctgcgcgcgcggcgaaggcgtgccggctctgcggaggcacttgctctcgggagctcgtcactgctgcttaagccctccccctccttcttcatcagcatcctccattccagctccttattcgcagctcttcctatcgacaccctcaccttcttcgcctcctatgtccgaccagaacgactcttctgcctctgccactcaggtcggcgaggcgctcgctgccgcgcacgagccgacctctgccccgaccggctcgacgatcgacgacgcccccgttgtcgaggaccctgccgtccccgagcgcgaggaggcccaggccgagcagacgaccgaggccaacgcatcctcggcgtctggccaggacgaggtcgagcagctcgaggactcggtcgtcatcgccgcggacgacgtgctcggagtgcgtccatcctgctcttttcactcgtcgatctggtcggccgaggttgccttcgctctcgccagatgcacatacactgcaacgctgctttcgtctaccagcgtcgctgactccctaggctccgtggttcctcagtcctcgctcttcaacgccttttcgctgccgccggccaagattacgccgcccaagccgaccgagtccgacatccccgtcaagccgacggctgccctgcccgacaactcgtcgccccagtcgtcaaacacgctcgccgtcggccctgatgggtcgcctgcgggcaacatcgagtttgagagcgtcgactggcggcccgagtatgacgagcggcttcagcattggcggtacgagaacaaggttgcctcggccaaggcgctcgcaaagcggaccgagtgggaggctatccgcaagcaggaggcggccgaggccaaggcggcggcggctaaggcggccaaggtcgaggtcaagacggtcgtcgaggctgaggccgaggccaaggccggctcgtcggccgtcggcagcggcgtcgtgaaggagctcgggctcgagctggtggaggtcccgaccgccaaggagggtgatgacgaggtgcgctggaagcgagtcggcgaggcctggaagcatgccagcgagtccaagtcgacgactgaggccgacgtcaagatgatcgggggcaacaaggttgaggtcagtactcggcagggtgtcgagtgcgcgcgaagaccaaggagctgatcccccttccctgccctctcagacggttgacccttcgatcgctgccgaccctgcgcctgcgtcgacgtcgtttgccgagtctgccgagccggcgcgtttgactgagagctcgtcgtcgtcggcgccggccaagcccgagcccgagtcgtcgagctccagcgacgaagagaagaaggctgtcccgaccgacattgccaagtcggcgccggccgacctgccgatcgagacttacctaatgggctcgtcatcgctcaacccgccgtctctcacgctcgccctcttctcgtccaagtacctgccgccccggcggcggattctgctcggcctcgcgtgccttggtgtcaacgttctgctgccgttcatcggaggcatgagtacgtcccgcctcagcacccttggctcagcttgccgatctgacctgctccttctcctttaacagtggccggtttcggagagctcgcggcgaagggcatccagacgctcgtccgggagaccttcttctacccccggtcgttcagcacgtcgggcgtcggcctgagctcggcctcggagcgcaagaacgagtctgcgctgcactcggccgagcggacggcagcgaccgtcaatccgctgcggtcggccttcccatagatccccatggaccgggttgtaccaatgatctctcgaatgtccaggcggcgaaggcgagcatttaggcttttaagagagtttgagacgccacgctacagttggtctagacccctccctcagctgctgcccctagctgcacctcctcacctgcgtcttagcagagatactcgtcaccatcgctttccctcatccgtcatctgtctgcttcgcccaagatggacaaggtcgcccgctataagcgaccgtttctcgtgctcgccctcacggccttgcttctcatcgcgctgagctcggtcggccccggccagcccgtcgcccgcctccccgcgtcgacctcaaccgacccgccgttcctgcctcagctgaatcccggtctcgtagcgggcgagcaaccgactaggaagccgccaccatcaccgccagcgacacccccgtcgacttcggtccggccgccggccgaagtcgaccgctccggcttgcgctgcgcgctccaggtgcgttgctgtcgagccgcctgccgacccgatcgagccgaccaccggctcactctgctcttgccgaatccaggacggtcaatacttccacgaggaggtctggggagctgctctctactccctggcccagtggggctgcgacctgtccttgttccgtgcgtccgcgggcggcggctcgtccaacccagctcgtaggcgctgaatatcacctcttttacgcagacctgccttaccactcgaactttgagacggtgacggcgccgctttgggccaatcccaaaggccgcactatgagctggccgggcgggatcatcggcccgctcgagcgaggcgagatcgacctcctattcatcacctcgggcgacgacggctggatcgacgaggacgtccttgcggcgatgatcaaggccaggcggacacagatcgtcatcatcatgcaccaaatgtgcgtctgacttcgtgtccggtccctctgctcgacgcctaacaaccgacttacccccctccagagagaactttgggccggagcgcaagtcgatggttgaaatcgcccggcagggccgactgacgtttgccggcctcggcgagtcgaccgcagacctcatgaaccaccgggtttctgagtgggcgatggaggacgccgaggttgcctgggaccgcgtaccggtcgaggtctttgtgccggtccgtgttccagcgtcgttcggagcgcaggagcgtgctgactgtcgtcacccccccccccggacagatcttcccgctgcacttcaagcccgctagcaagacgcgcaagatcccgagcaaggttgtcatccagggcaagattgcacagggccggcgcgactatgagaagatcatcaaggagctccacaagctcatgatgggttcgtcgccttagtgctgtcgacggcagtcctctgacgattcgcttttgtctttgccggatcagccgacccaaacgtttggggctaccacctgccggccgacccgaccggccccttcaactggctctcagtaatcgacggccacccagacgtctttgagctgcacctcgtcgggcagattgagatggtgctcgacattccggacgaactccgccctgtcgtccaggtccacaccgacctctcgtacgacgagtactatcggacactcgcctcgatggatctcctcctgccggcctttgcgagcctgcactacttgcgcgacaagacgtcgtcttctataccggccgccgtcctcagccgggtgcccgtcttggggtcggctcttatggtcaaggtctacgagtttcttcgctcgccggcaatcgtgccgtatcctgccggcctcagcgaggtccaaagcatcaagctccttcgcgagggcaagtcgctctgggacgccgagcgtgacctctgtgcgtgctgtccttcgacaggcaagccaggacgcaggtgctgaccctcgtttcaacctgcagacgtccctctcgaccgcgtgcgcggcaatgaggtatgtaacgactcgtcgacctcgctcgatgccgcctgggacgcctatcaccggagcatctacgccgccaacgagcagatctgggagcgcacggccgcccgcatggtcgcccagcgtgcgtggatagatcggctcgagggctagctgcttctcacatgtattgttctgctgtcctgcgaagagtcgtggccgtgggcgccgagggcgcactcgtcatcgttaaggcggccgcggcgaccaagcggcgaccggacgagcgggccgcgaattaaccaaacagctctgaatcaccagggcctacgaaggtcgctttcagccctcgtcgaccaacctgccagcctaccgcttcagtcagagctcatatcgcctgctctggcttcgcatgaaggccacactgccagctagactgggatctcgggctggactgccgggcggcctccgagctgcccttgctgccgccgtcgatgctttgcgcccccgaatgacaccgtcaagtctcgactctccgagcctccacaacgatgggtctggtgggggcggggtggcgccgtctctggtgcagcagcgcggcccgtcagttgcctccgggcatcgagcattcaggcttctgcgcaggcccgtcgaagggagccgctcggcatggacgggaagggctcgagcagggctgacggccgactgacgacaacctacccgttagctcgtcgcttgccctatctcaaccgagctctttcgcagcctccatcgccctactcctccccgcgtccagaatcatgtcgtcggtccctttgactttcgagaaggctgcacaacgtcatggctgaccgaccgcgcctgctctgccggccccttccgcagcggtgtccctcccgctccgaccccgccccggtcgtccatgacgacgacgctgggtgtgaacgagctcgcccagcaggccgccgccctcgacgtcgagaagaatgccagcggcgctcgcggcacgacctcgcatcaccaccgcggccaccaccaccaccgcttgctcaagatgaagcatctgcaccacaagcctggcatgacgagcctagaagacggtgccgaccagcccttctgggagcgctacgttagccggacggtcaagaacaacagtcagtctgacctcagagcgagcgtcgctgcatgccagctgacctttccccccgtccgcgcgcagttgtcgcggctatcagcgagtttgtcggcacgacaatgttcttgctgatcgcctttggcggcacagtacgtcgttgtggcttctgtctttagatcaaactggcgagactgacggtctccgcctcgttcagaacgtcgccaacatccccgacagtgcgtttgcgccgacgccctttctgcccagccggccggccgtttgactgacagacgttccctgacccatctccaggctcggtcaacgcgactgaagccgaggccatcaacaccaatgtcaacccgtcgcagctgctctacatctcgctctcgttcggcttctctctcaccgtctgcgcctggatcttcttccgtgtctcgggcgggctcttcaacccggccgtctcactcgctttggcgctcgtcggcgccgtcacgcccggccgcgcgtgcctgctcaccgtcgctcaaatcctcggagccatcgccgccgcggggctcatcgagggtctcctcccgggacccctcttggtcaagacgagtctcaacaacggcatcagcatcgttcagggtacgtctgctgacccctacccctggattgagaccagtcgctgattgcctggtgacccgcgacaaaggcctcttcctcgagatgttcctcacctcgctcctgatgctcgccatcctcttcctcgccgctgagaagcacaaggcaacgttcctcgccccggtcggcatcggactcgccctattcatggccgaaatgactggcgtatactatacgggcggctccttgaacccggttcgttgagcgtgtgtcacccgccctctcggagcagtctgctgacattttgcgctggcacgctccaggctcgctcgttcggcccagacgtcatctcgggctccttcccgggctaccattggatctactggctcggtccggcaatgggcgccgtcctcgcagctgggctgtacaagctgctcaaggtgggccttctccctcttcgcgcctttgtcgtccctaagccccgcgctgaccagtcctttccttgctgttccaggttctcgaggtacgtcattctcttgttgctgggtcgttgcaccgagaccgtgtgctgaccagtcttgcgcatcttcccactctcgtcctgcgcagtacgaagacgtcgtccccgaccaggacgccggcgctgctgcggcagagacactcacggacgaggacgccgaccaccacgcccagaagatccacgccgccgagctgcttacccaggcctacctcgctcgtcagtcattcggagcgagagctaagcactacacacgcgccagctaacggctttcttgtttgcactccctttcacagaccaccacttggtcgtcgagaaggtcggcggtcaagccgagacgccacagctgacgaccgagaacgtcaacgcggcccggatcggcgagctctcggctaagctcgacgccgtcctgtcggccgtctcggccatcaactcgcgcgagcgcgaggcgtaccagacgtcgcttcggcagcgcgtcatgtcgcgcggcgacccggctcgggaggcactctagaagccttcgctccgaggaccttctctcttatggcctgcacggacatggtctcatacatcatctctcctcgcctcaatctcttatacgctcatcgcagcatcccgtctgttttcgtccgagggggcagctgccagcccccgcctcaatatctctcactgtagccacacctttcgtctctttcgaataatatttgcttgaccctcgggcttctctaatatattcatctaccctttcgttgggcgactctgtctgctgggcgtgcgacgacgagtctcgctcgtctgcctactgcgcgcctctaggctctgcgaggttcaaggtccgcgcccgcgcccatggccaggccggccaggagcgagatggagtcgtcgagccttggccctcctccctcctcaacctcgtccctccttcggtgacctcttccccagctgcagctccttcacgctgctctccagttcagctctcactcttccgacacccttctattgtctttgcctccttcgcccgccgccgccgccgcgtcccctaaacggcctcctctcacgccttcaccttccgcgtccgaccaagcaacccgacgctcgacccctcctctggccgtcctgacctccagctcttaaaattcgtcgatggccatcttctcgtccttgacctcgctcttctccggccagtcctcctcctcgagcgcttcggcagacgagccgacgctggcccaggcggcccacaaccggtccaagtcaaagggcaagatggctctcaaccggcaagactcggacgtctacaccagttcgtctgagccggtcgctttcccacctcagttagagactgacagcgagctgcctttgtcctccttcctgcagaggctcggccttacagccagcaactcgccgacgacttctcctcgcgcgtcagcctgcaggtcaacggagcaggccctggaggcctcgtgagcggtgacatcagtcggccggggagcccggcagccccgaacagcgccttcctcggctcggtacgtctgcttgcgattcgctttctccctcgccggaccgtagcatcgggcatcggctcgccttgaggcaggagaggcagaaggcctgcggagtgcgggctgcctggccagacggggccagttcgctagacgcttgggcgcgggctcagagacgagtcgctcgaccagagaccttcctcaccgagcgcctttgcttcgtccctcggttgagcaaacgctggcaaaggccaacctatcgagagctggcctcttgccgcaggcttccgctgggcacggcgtctggccccgcatcagcgaaaacgccgacccacgacacctgtcaccctgcgtccggtcgcacctggcaacggcttgctgacgctgcgcctgctccttgtcgtctgctgcagggtcgcgcaccaactcctccgcctcagaatggcggcggcttctcgtatccgccgcgggcgccagcgacctacttgcatctcgccggcacgtccaactcgccggccctgcacgcaggctcgccaagcacttaccggccgtcggcaccgcacccgcatgccgcctacccgccgctacgcacgacgtggtcgcgcttgcgggcgttcctcgcgtcgacgtaccccgatctcgaggactcgctcaacctgcccgcgccggccgaggtcatcaacgagctcgaactccggctcaacatgccgctgccgtcgtcggtccgcgagagctacctctgtaccgacggtcaagacatggacggcggcctgaccgagggcctcttctttggcctctcgctccttccgctcgaggacgtcctgagcgagtggactttctggcggacggtcgaggccgatccggcgactggcagcaacccgcgcctgaacgcgacgatgggctcctacccgcagcgcttcatcaaaaagcgctacgcttcgcgcggctggctcccgctcatctctgatcgggccggcaactatatcggcgtcgacctcgacccaggaccccggggcgagtggggccaggtcatcatctggggccgcgactttgacaacaagtgcgtcctttggcgcggcgagggcgagggtggctggggccgctggctcgacggctgggtcaccgacctcgagaacggcgagggctgggagctcgaggacgcgaacggtaacgacagcgccgtgagtctcgcgaatctgatcgcagcctgtcgcgctggtcgtgctgactgaatcgctgtgcgatcatagggctcggaggacgaggttggctactcgtcctactttcacgacccgacctcgggccggtctggtgccgacgtctttggcaacggcgacggaggcctgcgcatggcgggcgagtatcgtggctggcccgtcctcgaagccgtctgggacaagagtgtccggcagtgggacgcggccgggctgctcaaggtcaaggcaggagaggaggacgactttgggctcgacccggccgatgacgcggcggccggcctcggtctcggcgtcggcgaggtcggcaagaagggcggtctcatcgaggtcggcgagtcggcagaggaaggaggcttcatcggcggggccgaggaaaagggcaagcggctgctcatctcgacgatgccgagcaccaacaccggcatctaccctgccgaagagccggccgacggcaagctcgtctcgccgccctcggcctcgtcgtcgactgccatggctgccccgcttctcaccaaccagcacgcccggaccgcctcaaatgcgcccgagccgtttgatctgccgacccggaccgatgtcattgcagccgaggccgttgccgctgccgaggccaagaatctccgcggcggctgggtcatgagcaacctcctgccggaacggtccgagcccggagctgcgacgccggcagtcgcagtcggggccgagtaccgcgacgtcgacctcgaggccggccagactgcgctcttccaggacgagaagcctaccggctcgggcacgctctcaccaaaaggtgccggtggccctggcgtcctcggcttctttggccgccgaccctcggccgagaacacgaacgagctcccgcatccgatgtcgctcccgccgacgcctccgtctggcggcaccttctccccgccgctcccgacctcgtcgcccgtctacgcagacggcccgcctcctgcccgagtcaagtcgccgctcgcacctgccggcgagcaggtctcgctcggacaggtcgtcatccttccttcggccaactcgagcccggccgccgcggcgctcgcagcgcaggcgactgacgcttcggtccgcgagtcatcaacgcagctagtagacaacgagcgcgacaacgggagcgaccagagcagcagcgacgacgatgacaatggtggcatgcaggatgtcaacctgggtgcgaccggggccgacggcaaagcggcctgaggaaaggacgacagctgccttggtgagcctcgactctcctgccctccccccttagcgcgccttgctgacacgtccttgataactttcgctcacagctcagcttcccctttcgcattcctgactggaactacaccggacactcttgccccctgttgcctcttcgcactctctcctgccccgcaccctcacccttgtcggcccttgcacctgtacacgtcggactgccctgctctccaaacttgcttgcctcctcgctcgatcttcccttacgataccctcatacggccctgccgcttcgctattgctgctgaacaatggcttttgagcaccgcgaacctgccgtcagtcttcagtgcacgtcggttcgtcgcgccgccgcccgcccgcagagctcgcccgaccggacaaccatctcgttcctcccgcaaccaacgtcgacccctaaggcagccaacagcgcagctcatctcgaatctcgtcccctccagcccgacgccatatttgtcctacctttcctcatgtcgcagccgaccgccgtcgactcgctcatctcgcacgggctcgcgttcgccaaggacacgctcaatccgagcgcgctctcgacgatcctccgccagccgtcgtcgggctcggtgacggctctctcggacgcgccccggcttgtcttcctcctgcctctgctggcatcgacggcccagctccagctctcgctcggagagttcctcgccctccgaccgttcgtccaggagttccgccggagcgagatccccgaccgcgcgctccagagctggtggaccggctactggctctccggcctcggtaacatcgtctttactggagcgggcgccattggaactgggctctgggccgccaaaagatgcgcccagcacggaccaggtgcgggcggcgcaaagtgggcctaccgagctggagccgtctttacgctcggccacttcgccttcggccagtcgtcggtccagcccaacctccatcaatctttgcgatctcgtcgctaaccctgctctcgtccgcttccagcgtcagcaagatcatccgcctgctcgtctacggcccgcccaaggacacgcgtcggctctcgaacgcctggctcaggctgcacgcccttcgaacgctcacgaccgacctcccagccttcctctgcttcttctttgccgcctgcgcctgatccttgccggcgctcggagatggatctacttgctgctggccgccgagaggaacgagcaaggagggacccgttgcaatcgtggcagagctgcccgtctgtcgactacgccggcctgggctcgggcggcgcgcagtctctgcctcgagatgggcgacgaggcatcccttcttcgctgaggcacctgcctgcatcctcgaatcccgccgagatgttgacgggaagtcatcgtcatctatgccatcgctcggcgcatccgagcgttcgctcgcgagggacgccgcagcagacccaccgcagctggcttctatgcgattcgacatgccgtgtgcgcccgagcaagctcgtccaggaggcgtcaaatgctcgttccgtggagcagtttgagcggcctcggcaaccaagtggttccggtggggccaggctggcatgcgcaggccggcgcgagcggcagtgcagcggggaagcatgaccgatgcgcgcaagaggacggagaatgggctcgtgtttcgaaagccagcagctcagccagcctgctttgcgacctgcttggccttcttgagcttgccctcgagctcgaggaaggcccgcatggccgggtcgaggtcgtctagcgtgtcgtccatctcttcggccgtctcctctgcgacgaccgcgctggcagcggcctgctctgtctccttgacggcggcacttcgtcgggcggctcgctcttcgcgtgccgccagcttgcggtgcatctcgcgaacggcggccggccagtcggtctctggcgtgccggctgcgaggagcgccttgcgcgccgcacggagggccgtattgtactctatgagagagtcggcgtagatgtcgtagatgcagatcgcgcagcccgacatgcaacagtcttaaaaggcgggcagggcctcttggtcagcagcaggactggcggtacaccgcgcacgacccgcaagacacaaaccttcgtcgcccggtcgctcgggcttgacgggcacctcgacgcctgcgacggtcatcggtcccgcaccagcccgtgggactgccggagtcagaacgtccttgagcatgaccatcggccgttgtagacttggctggagcagcgagggcttcggcagggctttcgcctgcgctacttgcgaacgcttgggatcgccagaggccgcctcgccgaggagcgtcgtcaaggggacgtcagacctgctcttgatcggggcagcgccgggcgcatagcgaccgaggacgtcgcgactcgcggtcgattgcgcgccaagcaagactgatcgtgtcgcgagcgaccgttggcgagtgggtggcgattgtgcagcggcagtgggtcgtgcgaggcggccgagctgcagaggtaatttcgtcgtcggcggccgcatcgtgcgaagggcccgagactggatcagcgagcttctttatcctcgcccgtcacacccgctcgcctggagcccagatcagacttgatccggaagatagagagtggccgggcgtgaagggcgtcaggtggtgttggccgtcggggcggccgagctctcgctgcgccgcgcgtgtcgttccgagactaagcggcgaagtgaaccccgccgagggctgaactcgagccgacggcccctccgacggccaacctcgcctcctcgttccccttcagctgacccgtctcaggctgacctggcctgcagaggtgcgatgatctctctattgcgctcccaatctttcgggccgctaagggaaatagagtagcagagacaccgcctctcagggtgctcgcccgccctcgccgcaaccctcaaaggaaggacggccacctcctgctgttggcctgctcttttctcccacatccactttaacccgtctgccggcctccttacccgcccacccagctcttccacagagagcccgctcccgccaccaacctctccctcgcgctcctcttgtcacccgctgtctgctcgacccccatcaccgccggctcgcacccctgcccgccatgtcgtcctctccactcctcggctcgcgctcaagctcagtcgcgtcctcccctcgcacatcacgagacctcgagaaggcttcgctaccgcatccgatgccgctcagcaacccgccctcgacccggccgtcgcggctcgtgctccgaagaacgctctatgcgctcgccgccgtcggcctcgtcatcctcggcctttcgaggttcgagatcgccgtcaacttctatagcataaatgtctttccgtcagccagaagggtcatcacgacgccacccgtgccgcaggctgtcgtccgggaatcggcacccaggtgcgccgctgcccgcaggtccatctcgctcgcttgacgaccgtcgctgacctgcctctgcttgcctgacccagcgccctgctgcaagacagcctcatcgagggcgtcaaatatgccgccactgccgtcggagctggcttcaaccaacagctcatcagttacatcatgctgctccagtacgcgcacgaggccggccgtgtgcccatcctcggcgatttcatcgccgcgtccaacccaaacatcgcgacggaccggccgctcgctgctcacgtttccttcgtgcgctcttcctctcctcaagctctcgcactgttgacctcctccgagctgacacgacgtctcctgtcgcgcccctccaggacaccgtctttgacctctcggctttcaccgccgcgacgagccaggcggtcacgacattcggcgcactcaagcttccctcatctgagcctcagacgctccagtgcttcgcaaccaaccaccggaccgagcagcagtcgttgaagggcatgacggccgcccagccgtggggcatcccgtggtcgaccgccgagggcgtcgacatggacgtctgggacgcccccgagtcggtcaaccgcgtatgggcgaccgagctcgagattggtgacctcgtcgccttcagcgaggaccccgtccggtgggagatggccgtcagtcaggcagagagcgaccgggaggcggccgaggcgcggggtgaggtcgagcgtcggtcgtcgaccgccttgcccgagcagcagctggcctgctggaccgacgtgagtcttcttacccttcatcgcgacgctatagacgcacataatgacatcgtctcctctcccgctacagctctcctgggcggtcgacaccgacactgtccacaacgagcggtggggcgcttggcccgcctgggaggccgttggaaagcaccttcactttgcacccgtcctggagcagctcgctggcgagtacctccgcaagactctcggcacacggcctcgagacttcattgctatccgtgcgtccctcgccaatccagtcttccacctggcagtgcggctactaaccctcgctccacccctccgactttgtagacgcccggcacggcgactttggctgcccgtcacgcgactcgtccgagccagcatcgaccctcggcagcaggtcatgctaccgctctccatcatcgtacctctcgacggtcaagatgatccgaacccggctcctccgcgagcagggcatccgcgtctcggccaagtcggtcgttatcttttcggacgagacggatgagcgctggtgggacgaagtcgccgacatgggttggaagcgcgtcaaccacggcgagctcggcaccgagcgtcgcttcgacaactggtacccaaccctgatcggtgcgtctttccccctcccctcgcgctcctccgccgctgttcattcgactgacaacccgctctctctttccctccatctagacatggtcctcatgagccaggccaagggcttcatcggcaccaccgactcgacctactcgctcctcgctgcccgacgagtcgtcgactggcagcagggcatcgtcacgctcgagggacgctgaggcggcaggccgcctttcagccccctttcgtagccttagagagtctccttgtatgcaagcatgtacgctgtagaaccaagagcaacagtccagaaagtgtgccggtcctactatcgcctctttgcgccggcgatcggagggggggttcgtcagaaaataataaagccgcgttctctcgctccaggcgcgctgacctaaagcagcgtccgaccgtgtacgtcagcccgcgagcgaccctgcctttgctgaccctgcctgcttgctgctgacctctggccgtacgtcagcaagggctgacaatccccgatgaggccgcgcggcgttgatcttggtgggaagctgctcgcaaaaggggttaagaagggcgggctcggactggggcatcttctcgtccaacacgctccccctttccctcacttcagcccccctcgtgcttttgctatgccgtccgaactccgcaacatcctcatcatcggcgcctcctcggctggcgcgccgctcgcccgggcgctcgaaaagaagctcccggcgacgcaccgggtcgtcctcgtcgatgctcaagtgagtagccgcctcagtctcattactgccaggtgccgcgtctcacacacgctctcttctgaaggctttctcgtactacccgatcgctgccctgcgcgcgagcgtcgtccccggctggtacgtctttgcctccccttgtcgacagtcgcgtccgggccgctgacgcgcatctctctccgctcgcagggaggacaaggtcttcgccgagctctcgaccttcttcccctcagcgtcgcagcatgttgtcctaccgagcacgcgcgtcgttcagcttggggaaggtttcgtcactgtcgaccgtgaaaacctcgacaaggggttcagcacgaccatttcgttcgatgtgagtctcgcttccccttcgcaaagatgtctgagaggcagccacaaatctctgaccgcttcctgcttgtgcttcagatctgcgtcctcgccactggctcaacctacggcgccccgatgcgcatgatcgccgactcgacgtcatccgccaaggaagccctccggagcctccagcgcaagatcaaggatgctcagcgcatcgtccttgtcggcgggggcactgtcggcatcgagttcgctggggagatcctcgaccggtccgtcgttcgcttttcgtctgatgcggcgctcagctgacccgtctcatcgcggccgggttgttcagctacccaacgaagcaggtcaccgtcgtccagtcgagccaacgcctgctgagcgatccctggccgaccaagctatcggatcggctcgagtctgacctaaaggatatgggcgccagcatcatctttggccagcgcgtcgcctccgagtcgctcagccagtcgagcgggatcgtcaccctcgccgacggcgggacgctcgaggcagaccttatctttccgacagcaggaacgacccccaactcgcagctcgtcgctgcccaggcgccgtcggcgctcaacgctcgtggctatgtcaaggtcgacgagtatctccgggtgcgtgcgcgcaactccttcggtctaaagcgcccctgctgaccgtcttcatttccacaggtcgcctcgaaagagggcccctttgcttcgccgtccgagttcccttactttgccggaggagacgtcgccgatagccccggcggcgcgactgccatctcggccggcaacgacgctgccgtccttgccagaaacattttgacgctcgtcggcggcaacaaggccctcgccaaggtgtcgcctccgatgaacgcccttgtcgtccctgtcggcagcaacaagggccgcggccagatgccaatggtcggccttgtcggcccttggatgacgcgcctcgtcaagggcaaggcgctctttgtgccggcatggcaggccaactatgcctgagcctacccgtcctcttgcccgtccctgcccttcccatccgctatcgtgctcccctcccactcccgtaatcgaatgaccctgcctgtgacttgcttgatgtacatggcatcggctggaccgcgtcgcggtcagggacactgcccagacagcattgaaaaagagaaacagagatcgggagaggacgcgaagcccgagacgaggcgcctccgagcagcagagcaaagagcaggggtcactcgtcctcgctgcccgggtcatcgccctcaatctcgccgcagctctcctcctcgatcaatcgccgggcttcgagcgcgcgctcgaggaaggcctgcttggcccgctcgtgctcgtaggccatctcgtcggcccgccgacggaaggcttgctggatccacgtctggacgtcgagctcttcgtcatcgaacggctcgcgggcggggaccacctcgacctcgtcctcgtcctcctcgtcgggctcgaagtctgccttgccgtcgtccattgcaagcggcgcaaccggagctggctcggcagcaggaactggaccggtacgagaagacgaggcctcggccgggctagccggagagccccagcctgccttcaaggcggctggcacggcgggcgctgagaagacgtcgtcttgcgattgggctggaaaagctgcggccgcagtgctggcgacctggccaaacgaaggcgcgagaggttgctgctgctgatgcagctgttgagggctacgaggcgagacgaggtgcgatcggaccggcagacgcgagggcgtgccggcacctggcgtactcgtcgacgcggacgtggaggcagccggagggaacatcggcctcggtcgaatcagctgcgccggcggtggtggggaccgaaccgtcaacggccggcctagcgagttaggctttgccgacgacgtagcgatcgatgacgaggacgacgcaggtctcgccggcaagggcgctggcttgatgaggttcgccgaagatgacgaggaggatgggaggggcgtcaacgctgacgagccggagacgtctcgctcgcgagcgggcttattgctgggaggtggcagcggctgcgttggtgacacgctcaatgtcgtcagtacaagctcactagcagtgagagacagcgacaggcgacttaccgggttcaaaggtgctggagactcgacgtccgtcttgtgctcatcctcgtcgacatgaccgtcgtcctcagtctccgatgcatcaacgacggccgccgccttctttccccttgccttcgacttcgactccgcaagcgccaccttggccttcttcttggcgaccacgggcttcgctctcggtgccttctcccgctcaacgctggcctcggtgtcgagaccatcgtcgaccgcgccctcatcgctcgcctcgtcacccgtagcaggaggggcggccgtacgggatgctgccggtgccgtcgccttgcccttagctgcctgggtcgacttgcgcgctttgggtgccggctcagggctgggggatgctggccgttcctgcgcgagctcgtcctcgcttctatcggtcgcctcaggaggcgcagtcggcgacgccccacgctcaggcgacggcggcagtggcttctccttcttgctcgcagccgcggacgacgccttcgccggcttggccttcgactttgcagtcgaggtggacgaagcgggtgttggcgcggtcgtcgttcgtgttcgaccggcgcggctcgctgttgttgtgctggtcgttgccgagggcgccttctgcagcgagcagagcgatcgggtcagcaacagatggcgattgatcgtgcgatgatgagcacggcggtgtcagcgcgcagggaggaggagcacgaacagactggcgcgatgctcgggtcggcttgggcgtcttggccgcgggcggactcggcatgtcaatcatctcgaacgcatcctcgtcgtcctctccggtctcctcctccactggctctggcgtaggtgcacgcttcttgccgctgactgctgcgggccgcttgccgccctttgccgctggctttgaacttgaggccgaggccggacgagcggacgaggacgctgctccgactgcggcgaagaaggggcacttgggcgtccgcttgaggtgctcctggctgagacaatcgatgggcggacatgaaggtcagctaggccgagttatagccaggagagctgtgtcgagtcaagtcgcacaagggatcatctgacggctcccagccgtcgaggccgagctcgcagtagaggcaggttgccaggtcgggcgcctcggccgtcggcgtgaacacaaagcctgccttcgccatctgccgagcaaagcgtgcgagggaggcttcagtcagtcaactaatcaggagaacagggtgtcaagagggcacgcactgcggacgacgtcggcgtccagcccttgaacttgtcatgcggccaccactttccgaacgtcgtcttacgagccatctccatctcggccggcagggtgccaccttcggcctcgagcgaccagcggacacccttgccctcgtcatcgtcttcgccgccctcggcccggcggcggacctcgacccggcagcgcgtgtctgcccagccgcagtcgcggccgtggccgacgtgctcgacgaatgcgtcgtcggttggctcccagccgccgagcgacttcttgcagagaaagcacgtcacctggtcgggcgacgccttggacggcgtaaagtaccagccggcccgggcgaggagcgccggcgtcagcgccggaaaggtcgtcggcgcgagcggccaggcgccgtgcgagggcaggccgaagcggcgcgaacgcgtcggtgcgaacgacagcagccggttcgactcgagctccatgccggacatggccggcggcggcttgagggctggagactagcttcgggagacaactgctaaggtcgaccgaccaagggctggagaaccagaagaggttgggcggagccgctggctggctggctggagaaggacgcgctcggtggtgaagagctgaggcgctggtcggccgattgaagcttggatgcgaaccggtgagagcgcggtatttgggcgttgagcagagcagattccggccgagctaaagggcgactgcgagagagtgcgagggcgaggcagggcgtagagaggcgtggcgtcggatggctcaacaggggggcggccggcgatggtcgaggtgcttgcgtcgaggcggcgcgcgcgcgtatcgtcgcctcgtcggggcagtctgggtttgttctgcccccaagttgggaagaaagccctccgacagcgacgagtctccgacccttcgacgcccctgtcggccatcacttccaagccacacccccttccctgccgtctctctccatatctctcgcagttatggcgcccccgaaggactcgcgtgcacttccgcctaaggaggaggcgctcttccgccaggtcctcgtccgtcccggccgcgctcttacgcgccttcagacccggcgttcgagcctcaaagaagccagggctgacaggctcctttctctccgtcgtagcaacaatacgaggccaagaactttaagaaggtgaaaagagccgtccatctcgcctgtctgtgggcgcgggggtgtcgctgctcgcatgtctggaagtacagacggctgacagttcgtcactctgctcgggcccggaacacgccaggcgatcaagacggctgaccagatcctcaagaagtacccgggcaatggccgtcggttctggcgcgacctggccactccgaacagacttgagggtactgacgcgcgctttcataccactaccgcagagactgtctcgatgaaggcgctcgtcctcttccactcgcccgccaaccccgagctcaaggtaacggtcgtcgacaacgagcgcgacgggcttgccctcgccaaggagggtgtccgcaaggacgctgagagccagctgtgctggcacattctcggcatgctccaccgggcgaagaaggagtacgcgctcgcggccaagagcttcagccaggcgctcaaggccgaccctgttcgtctcaaccctcgtgcgttcgcgctcgctgtcgctgacatggcccgattttcgaccgcgttccggtcactagcactcgcagcagattctccgcgacagcgcccacatggcgcttcacctgcgccagcaccagacgcacctcgccaaccggctcgtcctgttccagctccgaccgaacgagcgcaagtcgtggctctcgctcgcgctcgcctacgagcttgcaggcgacttcttcaatgccgagcgcgtcctaggcgggctcgtgagcgaggtccagcgcgtgccaagcgagggccgcgtcgaggagggcgaggttcgcgagtggcgcgtgcgcgtcctatgcaaggctggccgctggaaggaggcgcttgaggcgctcgatgtgggcgtcagggaggacgaaatcatcaaccgggaggaggccggcgtcctgcgaggtcagtcgagctgcttcgggatgcttgcgagaggccttcagcgccatggaggactgacctccgatcggttgcaactccgcagccgacatccttcgcaacctcggtcggaaggacgaggccgaggatgcgtaccgggcgctgctcgagcgcaactctgacaaccagcagttttacatcgatttcctgctcaaccgcgggctcgacatccgtgtgttccaagccggcgcaatagcggctcgcaggtccgagttgaccatcccttcgcctcttcgatcgcaggcaatctgacggatgagagccgaccaaaggtcctgcgtgcgctcgaaaactttgctggcctctacccgcgcgcaggcgccccggcccggctcgcgctgtccatcgcacagggtcagtcgtgaagtcacagcgcgtcgccgacagcgaaggctgactcttcccgctgactcacatgtcaaaactcaccaggtggcgacttcaaggcgctcgtccgccagtacgtcacccggggcctcgagcgcggagtgccgtccctctttgccgacctcaaggcctactacagcgaggagggcaagcgggctgctgtcgaggccgtcgttgaggagctcaagtcgacgctggagtcgaccggcacgctcgatggctcgaccggtgcgtacccttctcgcgtggctcaagtggttgcaccgacgtcgatgactggccgtcggctgacccgacattggccccttccagactacacccagccaccaacgacgctgctttggacctactacttcctctcgctccactactcgcacccgtcgccggcgaacccgacgccggacccggctcgggcgctcggctacctcgaggccgcgctcgcccacacgccgaccctccccgaactttatacggcccgggcgcgcgtgctcaagcactctggcgacgccctcggcgctgctcgggcgatggatgacgcccgcgcgctcgacggccaggaccgcttcctcaactcgaagagcgggaagtattggctccgggcgggcgagcccgagcgggcgcaggcgatcctcggtctcttcacgaagaaggacgcaccaagcccggcggccgacctcgtcgacatgcagtgcttctggtttgtgacggaggacgccgcctgctgggagcagaagggtcgcctcggtatggccctcaagcgctacacccagctgttcaaggtgcgacattcccggcggctttcgcgtgcgtttgcctgctgatttcctcccgttcgcggcctgcagatgtttgaggacctcgaggacgaccagttcgacttccacggctactgcgtccgcaagtcgaccttcaaggcctacctgaacctggtcgagttcgaggatgacctccgggcccggccgacgtacgtccgcgccgcgctcgccgcctcggccatctacgtgcgactcgcggacgacagcgcgctcgctggccgggcggctgagctcgagagcagctcaggaggcgtctcggccgaggaggcgaaaaaggccgcccaaaaggcgaagaaggctgcgctcaagctcgctgccgacgccgctaagaaagccgccgccgacaagaaggctgccccggcagcggccgtcgaggcaccgccgccgaaagatgaggaccccgccgggctcgagctgctcaagacggccgcgcctctcgacgaggcggccaagttgctcgccccgctccagacgtcgcccggcgtcgccggccggatcgacgtctggctggccgtctatcaggtcgcgatccgccggggcaagtacctccaagccatccaggccctcagccgggcgtctgcgatcgagtcgacgaacgccgagctcctcgtccagctcgttcacttcaaaaaggcggcggaggcggcgaaggacctgcccgagccgacagcggcaatcgtcggctcggccctcgagacccttttgccggcatcgaccgacttgccggcctttgtcaaggctgcgctggcagcccagccgcattcgcccgcccatgtcctggctgccgcccgtgcgctgacacacgtcgcgcccgagtccctgcagaacgacgtcgagccgctgctgttcaccctgctcgacccgttggccgtcccgacgacgtcggtcggtacggcgcttggtgctctccgactgctcgagagcgccaggagcagccgcgccggcgaattccgggaccaggccaaggcgcgctggacggtcgctcgcgtctttgacacgtctgacgagtcgcaggcccggcacgagcagttcctcgccgacgacaaggctctcaaggagtctcgtgccaccgtcgacggcctgtagatcgacgctcgcgtccggcattaagaaagacgcgtcgccgaccgacttgggaataaagatgtcgattctagagaactatgcagggccctctttagcaagtgggtgaaatgcgtacagcaggtggcgtaaggggactaacgagcgagagtacgcacgcgagcgcgcctggccgacaaagtggccgaggctgcctctgccgccgtcgaccgcacgacgacaaccctccaactgtgccttcctcccgtacacgtcaggtttaccagacgcgcctgcaccgttaacgacaaggctagcagcgcgtctcaaccatgccggtagcctcggtcgtcgacgagacgccagcgccggcgtcgctcgagccagccgcagctcccccggccgcagctccgactgccgctcgagtgcccaagaagaaggcgatccgactcccgttccacgtatcgcacctgccgaacgacgccatggccaagatgcagcggatatgtggcatgtgcgtccttgcgagttggtagaggggagccgagcaaccgagctgtggcaaccctgcttcgcgacctgaccttctttcttgtctcgacctttcagctgccggtcgaagccgtcgccctatgcgtgccctcgctgccaggtgccctactgctcgctcgcttgctatcagaacacggagcggcatgcgcagtgctccgagccgttctacaaggaggagattgcgctcgagattgcgagccaagggacgcccggcggcgcggccgggcccggcaagtctaaggaggagcaaaacaagatgctcgacatgctccgtcgcttcgaggaaggcgcaaacgaggatggcccgctcgagtgggagggagatgagccggccgccggagatgaggcaggtgacgggctggatgagctcgcggagttgctcgagacggctggcctcggttcatcttaccccgtgccgccatcgccacaatccgaccgatactgatgatgccctgcccatctcacagacggcgtcccacctgacgagttgctggccatgctacctcccgacctgcggtcgcagtttctctcctcggtcgccaactcgtccagccagccgtcctcggtgattcagtcgctgctcgagtcggacgagctcaggaacgaggagcactcgccctggtggctggaggcggaggctgcgacgcaaatggacctcgacatcccgcctgaggcggttcagatcccaaaggctccgtctcggccggccccggaactggtcactgtttcgacagccgtgcggccgtcgctcgaggcagcgcagcgtgtgctgttcaacgtcgtggccgttgcgtgcgtccctcgacatcggctgctttgctcgagctggacctgatccttcaaccccctctacacagcgtcgcctacatccacgcgacgctcactttccggcgctcgccgctggccgagtcggtgccgccatcgggcgagctctccggtctcgcccttgaggacgcccgggccatgctcgatcacttgctgtcgcttgtgcccttcgtcgaagagtcaaagtcgaccgtcctgttggcctccgtcaaagatgctcgcctctacacaaactcgcacctagatccctctgtgagtccgcttctgggcagcgcgtcgttctcgcttcacggactcacccgtctgttgccgactcgacgcagtccattctcccgcccaaaatcttctcctcccacatcttgccgctgctcaagccgccttcgcccgtcctcgtgaccgatgtgacgtcagacccgcatccgctctgtctcgccctctccgacatccaccgtctgctcgctctcacagcttcaccggcgacgcgctcggcccatcgccggacccaaaagaagcttgacttctacattgcgagcgcggcggcgtggatgcggggcgactggcaggagctcatcgcgcaggtcgacaagatggtcgagcgcgagctgctcgaggtcgagacggacgagctcttcgtgacagacgcgccaccgccctcgatgacggagcccgaggagcgctccgggcgacgaatcgaggagctcgacgcccctggcagcaacccactaccagtctcgtcgatcaccgagatcattgacgacgagagcgaggcggcccggctcgatccatgacgctttgctttcaatcagttgtaggacgtgtgtgggaacggtgcatgagagacaggtgcgaggaaagggcgtgacgggcatggtgtggtggagggccgcacaggggggtcgtgatcgttaagggcaaagaggcggtcgtaagcgattgttgactgtgcgaacgaagggggccgctagaggctcgcaagaaggtcagccgtgaacgcgttggtcgcgagccggtccttaaactcctcggcgacctccttgaggaccttgatctcctcctcggcggaggagctcgccgatttcgagtcttcaccgtcgacggccatcggctcgggcacgcgagcagcccaggtctgcaggaactccctgacaagtcgggtgccggcctcggtctcctcgcgcgggtgctttgagaaggggctctcggccactttgccgccggcctcttcgccaaaatcctcgagctcgtcggccttgcgtttggcaaactgttgaggacgagcagagcgtcagtgctggtgcgaggcgactgcgctcggagcccccaaggagaccacgcacgcggataacgctctctggaaacttagccagctcggcgacgcagattccgtagctttgtccgctgacgcctgacggtcgtgaaagtcacacgttgcgtcagtaagcggcctctcgtgatcgcggggcaggagaaacccacctggctcgaccgtgtaaaggaaggtaatctgcttgtcctgggcgccgctgccggtcgagctgacaagggccttgacctgcaggttcttgacgttcttctcctgcgcggcgaggccggtgagctcgtgaaagtgggtcgcaaagcaggcgagcgctttcgtcttggtgcagatgtatctgcggcgccaggtggtcgtcagcatggcatctttggagagaggtagcgagcccgaaagacgcactcgctgatggcccaggcgagaccgaagccgtcgtacgttgacgtgccgcggccgagctcgtcgatgatgatgagcgagtcgcgcgtcgcggactgaagggtccgtcagtgggtcaggggcaaggttggcgaaaacgcagacagggagacgtacgcgcagaatcgtcgcactctccagcatttctgccatgaaggtcgacacacccttcagctggctgtcgccagcgccaactctggcgaggatgcagtcaaagattgggatcgtcgcctcgtcggcagggacgaagcagccgatctgggccatgagggcaatgacaccaatctgccggatgtaggtcgacttgccgcctgtaggaagagacagtctgccgtcagctcagggcttgacacaagggacggcgcagaggactgacccatgttaggcccggtgatgatgatgaattcggccgagtcgcggacgagctcgacgtcatttgggatgaatgtcatgtcgtcctgggcctccaggcacgggtggcgcgaggccttgaggatgcagtcgccgccgcccttcttgagcaccttgggcttgacgtacgggatcggtgcgttgactgagatatcggcgaagctgaaaggtgattgggagggggctcggtcgtcagagaactgcatcaggcagggagaaaggagccctgggaggaatctcggacgcacctgacgaggacatcgagcttggcgatcgtcgagtcgaggttctcgagcaccggaatgtacgacgctgcagcggtgcgaaagggggagcgtcaggctcgcgcctgagggcctgcacattagtccgcacgagacgcaccggcaatctcgacgatctccttgacgaggccggcctgggccttggcgtagcttttctgcaggtccataaagtcggacgcgtgctccttgagcgtgctggttgtaaagtacgtgccggccttttgcgtgctgagctcggtgtagcctttcttattggcgatcagcttggcctcctagagcgcgcgagaacggcagcagcagtctgtcagctcgctcgaagactcagaacagcaggcagctttgcgcgcgtagactgacggctttggtgacgcgcaggcagtatccgtaaacctggtggttctccaagtgcaacttcttgtcggtgtcgagtccgagcgaccggccgacgcgctggtgctcctcgtcgagcccatcgcgggcccgctcgagcccctgcttgatctcggcgagcgagtcgtcgaagtcgggcttgatggcgtacgtgtgcgagtcgagcgagtcgaggtcgatcgtcgactcgaccagctcgaggtagggcttgagcgagacgtcaaactcgcgcaggccgctgataaagacctcggtcaggagctcacgcgactcggcctcgttgttggccgtcgagaggtcaatctgctcgagcttctcgatcaggtctggcagcttgaggatcgcctggtagatgcggacgacctcctcgagcgacgacatgcgccgctggagccgtttactcagccgagaaaagtcgggcatgcccttgaggtaggtcgtctggaagggcaggcgcgatcagttgcagtgacgaaacccgttcaaggggaacggggacgaacctgcagtgctgcgcgcgtctcagtctcatcgacaaacatttcaacaagcttctgccgcttctcaatctcccacagattaacaagcggctgcttgagccagacgcgcagcagccgcgtgccctgagccgtcttgcaccggttcaggagcccgaacaggctgccgtacttgccgccggcgccgttcggggccggtaaaaggttgagggcggcaagggccgatgcgtcgagcttcatgtactgagcgaggtcgtgcgtgcgcacgctgaaggcgccaaagttctgcgggttcgagagaaggcagaggtggtcgatgagggcggcgagcggcgggagggcggccgtcagggcgagttcagctgcgatgagcgagccgcaaggatagccaagtcagagtcagtcagcctcgaggggctgtcagcggtggtcgtcggactctcaccggcggcttgctcgggcttgcccttgaggagccggccgaggtcctgctcgacattcttcgggttgaagtcggctaacacgtcgaagcgagaatccagcgtcagcgcccggcaagatccatgggcacagctcagcgcacggagcaagaggcacgcactcgaccggaccttggtcgtcacgacgccgcagcgttcgagcatgacttcgatcttggcgaggtcatagtctttgcccgagaggtcgtcggttatgatggcctccttgacgccgagctggatgatgaggctctcggcattcgagaagacgtcgttgtcggcaaactgggcgaggccgagcgaccgggccgagacgtcggcgaaggcggcgccgacgacgcggccgccggcctccttatttgtcgacaccttgagcgcgagcgtcacgggagacgaaaggaggtcatgtgaggtaaacaggaggtcttcgacggccgaaaggttgccaggcgaggcctagaagcacgcgagagtattggtttgagcgactcgtttcgtcgggggacacgcgcaggcggagcagcccggtgccgaggaatcgcacgcacctgccgcgtcaaaacccaagcctgctgctttgagctggagtcctgcgaccagatctgcagcagtgcggcgaggaagcgtcgtcagcattgcccaggcttgccggttcagaggggtcggaggtgcgaacctcgacacgcatctgcttgacggtgagcgcctcgcggagccaggcccgagccgcgttgccgttgagtgtgacgctcggcaggcccttctcccactcggccgtcggcctgccgagatacttgagcgcggtcgatgtgttgtagacctcgtgggcgatcaggagcgccgacgggccgtgggcgctgtagtacgagccgcgctcgaagagccgggcggcgccggcggcaaggaccggcaggcgggcgtgaaacttgaggaaggcctgctcggccgacgagtcgccgagctcgagctgaggagtcgctccgccggccttgttgttgccgtacatgaggctcatcgtgggcaaagcgggaggtcgggtgatggtggtcgagtggacggagacgttgccagacgaaagctcatctagcggccgcctgcgagagacgcgacgactcgtcgcgcgcgcgcgggagacgcgacgaacgcaggtgcacttcaagtcgctcctccctccacgtcctcctcgtcctcctcgtcgtagtaggcttgccagagaggccgtcttgatcatagcaaggatgtgcagcgacaagcatctttatgggagaatcccctgtcgcacccggctttcaaatgccagcgccgtccgcctgccaagctgcaagcgctcgctccgcagaagcccggcgatcaaggccgataatcgatatcgtaccgacgccctgaagagggcgacaaattgcggcgccgagaggagctcaacatggtggcgcctctgaaagagtttctggcggggagcacaagctgtcgttgaggccgctgccatgccaggccaaccttcgtctcggtcagacgtgtgaagaagctcgttcctccacggcaggacgaagtcagaagacgattgcgacagtcctcgtcgcatcgcctgaagatctttggctcttgcgaggatggagatgatgatggcgggacctgccctcggggtgagtaaccggcccggccaccctcgagggggctctcgttcgggtcagttcgtgcccagtcaactcgctcgagagcaaggaagcggcgggtgagagtcagcaacgtgcgtcaccactcgacgggagatcagctctggacgggaggctatcaggaacgtcgagcgcccgtcatgccgattgaaccttctttccgtcgtctgcgccgcgcgtcgccttgatgccggctcggccgaggatgtttggcgctgcccgaactgaagcccggccggctcaccgacggaaggccgctctcagcgagcgacccaggccttcgtccctccctttctctcccccatcgacctcgactcccgttcccaaagcagctgtagcaagcagcagcagcgactcgccagcactcaccgacagatcagcaaacgatggacggttacctcggcgccgacgacgacctcgccgccggcttcgcgccctggctcgggcagggcgacgacgacgcggccttccaccttgacggcctgccgaccaaggatcaggctgagggcgatggccagcccgacttcttcgacctcgagagcatgctcgtacgtccaacctctccctctccggcggacgctccatggtagcggagcccgccctgcctgcgcccggccagcttgcccgcagctcccgaggctgataagcgagctccttcccctcttgccccagaacctgccctcgccgacgaccgcctttggccacgcctccttctacgccggctcgtcctcgcctgagagctccggcggctcgtcgtctgcgcaacctgctgagtcagccgcctttgactttggacccgaggtctcgtgggagggcatcctcgagcggcccatcttccctcagcagcagccgcagcaggtgacgatgccgccgccgaccgcccactcgccctttgcctcgtcggcatcggtctcggcctcgtcggtctcacagaccttctctcctccgacggcggcctttgtgacgtttgacaactcgcccgtctacgccggcggcctcctccctccgcagccgacatccgtcccggccggaggttttccgccgggcgtccagtcgccctcgatctcgtccacatcaccctcggttgctggctcctcgcacagcttgtacggtggtccgataccaaccggcgctcagcctccgcagcagcaacagcagcaagaggtcaagcgcggcccggccgtcccgccaaatcccgaacttgagcgccttctcgcgagcatgcgggcgtacaattcgacttacggcgctcggctgcccgtcctcggctcgccggccaccagcgccagcacgtacgaggcgtcggtgacggtcatggccgaccagccgtttgccccggcggcgccggcggcagtcgtagcccgtcccgtcacagcgaagcgggcctcctcttcgtcgccgtcgtcgtctttctcaggcaactcggctgccgccgccgtcgcgtttcacactgacggccggtcgtacgcccctcagcgtgatcagcggccgtcgagcgaggacgcctcggacggcatggtggacagtgaggacgacgatgacgacgagcaccggccgatgcgggccatctcggtcgaccaccagtcggctccggccggcgaagggttgaagcacaccagttccggccggcgcgggcgaaatggcgctggaagtagcagcaaggcggcggccaagcgcgtcgccgggggcgggctgatgagcagcgtcgtcgtcgaggctgaggacgagcgtggcgagggcgaggagtggcggccaacgtgagtccttgcgcgcttcgccgtccatcctcgcggttcaaatcctgatatgcgcgcgattctgctttccgatgctccaggcccgaagagtacgccaagctcgactcgaagcaaaagcgccagctccgcaacaagatctcagccaagaacttccgcaaccggcgcaaggactatgtcgaccggctcgagggccacttgtcggaacgcgaccggctgctggcattcgcgcgcgaggagatgcggcgcaaggagcgcgagaatgacgagctcaggtgattcccgtcgctcctggtggctgtcgctggtctcaacactgacatcctccctcttcgcggcgttgcaggcgcgagatggctgtccttcggaacgcagtctcgatgttcaatcagacgtcgttcagcgccaatgcctttggtccgggtgctgcgacgcccgctccctccgcgagtacctcggtcgccgacgacgactcgttctggtcggcgccggcgccgtcgttcgctctcaacccgaccatccagaccgtctcgcttccgccgcccacaaagcccgacccgctcccgtcgacggcaacccagatgaacctgaacccgctgctccagcccggcacgcttcgtcctcaggcgtcgccgacgacgatgacggctgccgggacgtttgagcactttgccgacgcgacgcccttctcggtccgccaggcgaccgttgaccagtaccgctcgcagctctgggcccggctcgctcgcgaggctgcttacgcgggcgtcgcgacgacggctgccgacgatgagatgcgggccaagcagctctcgctcaagcccctcttctttgcgcacccggccgccgagcagaagacgttcggcccgtcgctggcgacgtcgggcggtcgacttggcggcggcctgcctctcccggtcggaccttccgcgacggccctcatcgcctcgcacgtcgcggccgagcgggcagagtcggacgaggcctcggcgcaccttgcgctgctggccaccgtcactcagcagacgatcacgaccaagctcacctcggccttcctcgacgcctttgtcgctccctcgcccatgctcggcccgaactcgaccaagcagcagcggcagcagcaggcggtcgtcctcgacgcagacaagatggcctcggtcctcagcggcaaggcccgactcgaggtcgtccctgtcgagcaggatgcggcgccggtcaagcgtgagtgcgcgtcggtaacgctcgagcgggcgctcgccgcgctctcgctgtcgtttggcggcgcctgcaagaatcgtcaccagcaacagcagcagcgggcggcggcggcggcggcggcaatggcgccggcgacgacagccgacgtgcaggccaagaaggccactcctccgacgataagcggctggcgcgacttcctctgcccaaagaaggccctctcggccacgaccgcctagctagaccaccttctgctcttcttcatctcgggcctccttcgggccaaccattcttcgtctttgactcctctttttcgcgacctgcgcgaccggcctttcgtgttcccttcccctcatccgtgtccttccgccggcgcccttggtccgcccttttgtacccctcgctcgcgacctccaccactcgcccgttccgtccgtccgatgaccgaagtcaccatgtcccctgttacctcgctggagcaaccgttgccttgaggcaaaggagctgaggtcaggagtgacagctgagaagagtcgagcgagcgcaccccaccgagtggctgagacctgacttccagcgaccctggtcgcccggaccgatctctggctacatggatagattttcccagctctcgccattcatttcagcctctcttcgctaagcttccgggcggatcctcttcttggtcggcctgaaaccggccctcaataacaatctcgctgaaaataaagggtttcatttcttaggttcaaagtccaaatgtttgggtttggtggccgaccgcggcgcgcaggtgagctttccccgcgcccgttgctcctctccgcccgtacctcagcaagccaaggtacgccgaatagccccccttgcagcatcgcaagcccgtctgacatccatccttctcgaagatgactaccaagcgcagaaaccacggttcgtccgacaccgatgtcgccgtcgagaccagcacgaggccagcagcagctcgccgcccgcaggcaggcacgacggctcgggcgagctcgagctcgggcgaggcaggaggagagctcggagcagctcgttagctttgctcgggctcttgcctagcccctccggtcccgctggccctccgtccacctggcctgtcgctccacgagctgaccgtctgtgcgaaccgctcgccgctgccgcctcacaggtcgtaacaagcacggtcgcggtcatgtcaagccggtccgctgcgtgaactgctcgcgctgcgtccccaaggtacgtcaagcctcactggatctggcaccggccggcgactcgggttaatgggggctgggattcgaagacgagagggcgaggaggaatcgagcaggcggggcaggaggaagcgctggactgaaggagagcaaggcgacctactcggctcgacattctcctggccgggcgggccgggatctctgcagctcctcgctggcctagcccgtctagtgcgctgggcgccctctcctacccttgcgtcgcttctctttgagcaccggctcgaggaccgctcgccgcccgccgtcgcctacacgcctcaggctcgtcctgaccggctcctccctcgccccgtctgccccccctttcaggacaaggccatcaagcggttcaaggtcaccaacatcgtcgaggccgccgccgtccgcgacatgtcggaggcttcggtctacgccgagtacgtgctccccaagctgtaccacaagatccaccactgcatcgcctgcgcgatccactcgaagagtcagtcctcctcttgtcttgcctctcgtcttggcgctgctaccgaccaacgcgcctggtcgcgggtccgtcacctgtcgaaccgtcccctctgacgcctgtcgcccttcttgtatccctcagtcgtccgggtccgtgcgtccgacaagaacgcccccaactcgcgccacaaccgggcccctcccgtccgtgcccgcttccgtgacggcaagcgcgtcaacccggccgtcgaggctgccgccgccaagaagctctaaatcgcacgcctgcccacccccgcgcgctttttacccttatcggcccgactaccctcaaccccctccccagcccgacgatgcaaatgagatcgaaaacagccacacgaacgctccagttgcgctgcgggctcgccgtgggggtctggtcgctaaggagggcacgagaagaggggcagactcagcctgctgagtgtgagcgagcgtcggcaaaagcagcgcgacagctgacctggtgcaagggcgggagacgttcgagcgtccgtcagcccgacgactcctgccagaccctcgtgcgcgtcggcggcgagatgtcggtcggacggaatgtcagtgcacgcgagcgccgagtgggctctggccgcctcatggctgacgaccgctgaactacgatcaaagagatcgcagtctaccgcaggtttgctgtgctgccagtgcaaaagtcgggggagagagcagcacacggtcggcgcactgcgagcgagttgaggtcggggacagagggagggagagtggccgcgcggtgccagatcctaccgatatgccgctcccccttttggtagcatttcagaggggctcgagtcaagcgagtgccgcacgcgacgtctaacaaggacgactgtgctgagcggccgagtgcaaatgtcgctctgaacgaacattgagcgaggacaatgggtcaggatagaaacgcaggaggcttgcgcccggccacgctccgacctgggcgacgctagcgattggcctcattcccatagatgagcgcgactagtctgacagacaggaggctagcgagacgctcttccgaactcttgtacggcagtcagctgagccgccagggtgtgcgaccgtcgacgccatcgccgtcgagaggcacaagacgaggcgaggcgccggcgatgcgcgagctcgacctcctcgaagcccaaccaccacctcgcctttcgacctcctgcaatccggctcgcttcccatgtctggcaagcgacctgctgatccgctcccgggccagccggccaagctccagaagaagtgcgttgcttgcctcgtggctgcgcaggctgctgtgctgaccttgctcttaaccccccattcgcagtgaggccggcgtacgtcctggctcatcacctgctccagtctgtccttccagctgactaataccgcccgctttcctcttctagcgtcctatcgacccgatggccatgatcatggccaagaaggccgagatccaggcaaagctcgccgcccgtgctgccggccaggcgccgccagctgccggcagtgcgccctcggccgggccggccgccggcctgcctgtcaggccgcccccagcgtcagcagcagctcctggcgctccgctcgatccaacgagcctggctgccaaggtggcggctgctcgggcgcgcctgctcgcgacgacagcggcgatgggcatgtcggcccacgcacctcccgcagtggctgctccgacggcaacggcatcgagctcggcccgacctggcgccctcggtggtggggtcaagaaggagcgcaacgacgagatgccgcgcggaggactgacgatgggtatccacccgagcttgctcgagcccgcgtcggcagtgagcgcgctcgccaaggacaagggtcgcgcgacgatggcgcccaagttcacctcgctcaaggtgcgccccgcgtcccttgactctgtcgatcgtaaactgacgacattttcatactatcttgttggcaggctaacgcgcgcaatgcgagtggctcgcctggcccggccggtctctctgcggcctccgggagctcgtcggcgacgccggccgtcaacccgtacctcgcagcggccgaggctgcccaagacgagatctcgggcccgaagcgcaaggcccgcgacttcaagtttgttcagaaaggccgctacgtccagctcggcgaccagatgcgggccgacgcgagcatggaggcgctcaaggcgcgcatcgccgcgagcgcgcgcaaggccgggatggacaccgagtttgactcgctcgagaagctcatcaagcgagagccgccgccggcggtcgaatggtgggacgagctcctgctcggcgccgagtcgtacgacgtgctcgccgagggcacgagccaggtcgataacccccaggggccgatcacctactttgtccagcacccgattcagatcctgccgccgtgggagaagcgtaaggtcgagccccaggcgctcaaactcaccaagaaggtccgtaccgaacgactcttctctcgcttggcagctcagtcgactgaccatcgcgtgacacgagcaggagtccaaaaagatgcgcaagcaacgccgcatggccgacctcaaggaccggcaggaccgtgtccgcatgggcctcatcccacccgacccgcccaagggttcgtccccatccggcctgctgcttggctcgccccttgctgatgttctgtttcgccctccctcgctgcagtctcgctcaagaacctgatgaaggtcctcgccgacgacgccatcctagacccgacccaggtcgaggccaaggtccggcgacaggtcgagaatcggcggctcggccacgagcgcatgaacgaaaagcgcaagctcacgcccgacgcccggcgcgagaaggtcgagaagggcaaggaaaaggaggaggccaagggactctttggcgccgtcttccggtgcgcacccttctcgcttcggcggcgcacactgttgaggctgtgggctaacctcgcatcactccaccaacgcagggtccgctacctgtcgaatccgcagcacaagttcaaggtccggcggaacgccgagcagaacaacctgaccggttgctgcatttttaaccctaagttctgcctcgtgtacgttgagggctcggccaaggctgtcaagttttacaagcgcgtcatgctcgttcggatcgactggaccgagtcggcccgccccttgccgggagaggaggacgcgcctccgccggttaaggaggagggcgcccccgaggagaacatggacgagaaccggtgcgacttgatctgggaaggcccgctcaaggacaagagcttcaacgtcttccggccaaagaataccgagagcgagcgcagcgtgcgcgagttcctcggcgagtcgaaccagggctactgggatgtgagtcgcttgagcttactcgtcccgcgcgcaaggtcgctgacaggccgtgtgcttgttcgcaacttgctcagatcgccgcccgcttcaaccccgaggacaactgagcgccctgaatgtccatgtcgcctcctcctcttgcatcctggcagaccttgccatccaggaaagagaatacaacaggttgggagggcgggagcagcctgcggccgatttagttgaaggggtgatggacaggacaacaaggtgcacgtggccctggcgcgggcaagccctgcgctcgtagggcagcaaaggaaggaacgacgagaagaggtgaaatcgaaggagggggggtgtagcaaggattggtgaaagggtggcgcgggcgaagaagcgggagctggtctagttgcggacgtctggcgaatcaggagggccttggtcagcgtcgcttgcgagaatacgtccttgacccggactggaaacgcaccggcacaggtgtagaagcgaccgtaaaggccctcgagcccctcggccgtcttgagctggagctcgcggaagaggccctcggcaaaggcggggtccgaggcgcagaacgaggtcgtgaggacgacggtcgaggccttgctccggcaggccggagtcaggacaaagtgcgacgagtgcgaggggattgagatgctggatgagtgggcggccgggtcaggatttgtggtcggaggacgatcggagatgctagagacgccacttaccctccatcgacgatggccggcgccgagctcgtccagacccggtcgagaaaccacggctcgtagtcgtcaacggtcgcaatctgctcctcgagctggaccgaagcgacggtcgtgttgaggccgagcgtccgggggtcgagcgtgagcgagcgcgtgctaccgacggcgttgtcggtgccagagccgctgaagacattgaggtaggctgcgttgggcgggttgaagaagctgaggccggccgctgatgagatgagatgaatccgggttactatttgtcgttcatgttagttcgtggggaacaaggacgcaccgacgtcgatgagggtcgtcgggatcgtaattgagtgcgagacggagccggccgtaaagccctttgcgcagcccgactcgacggcgagatggatcgcctgggtgtcgagcgtgctcgagggaggggcagagaggaccgtctgagcgacccggcgggtcggggcggcggtgacggagctggcggcgaggaggagcgaggagagggtggcgagggcgagcatggctgatgctgagagcgggcaagaagcgggaaaagaggatggagggcgagcgacgagagctgggtcaagagagggtgctgcgcgttgagcgagtcgggtgaacaggccggctgtttgggaaagagtgtcgagggagtgagagcggacgaagaacgagatgatggaaagagcgagggcgaggtgagctggcggccgcgctcttcttaacgggctggccggcgctcccttctgatgcgacccatcgcgacggacgaccgaaggccggcccgataaatgaattggtaagccgaggggaagggagagagttggaggaatgcctgcggccgagacgcgcctccgagatctcgggttgagacatagcaggcgagcctcggccggcgctgggcacaagagctcaagcgcacgggccctgcttgcctgctgagcgtgagctggcgtcgagcgggtagccaagcacgtcgacggcgttcgagccaaccttatcgccttgatgagggcgagccagcgggtggagagagagtctggccgagcgtctcggccagagggtgccagcacgagccccgatgaaagggccgcacacgccgtgccgagcatagcggccgggtagcgtaaaggaagctcaagcacgtcgcgtgggcgggtggtgtcagcgctcttggagataggccagacgacaggtcccggtcgccgatggaggtagaggtcgaaagggcaaagagagcgacaagctgagatgaggccgcgcgcagtcgactcgaacgctcgctcgtcccaaggctccacgacttggcggaggctgtgacctgcaacgctcaggcctgcactcacgctcacacatggcgggcaaaagggagaagcatgcgagatcaggttcaaaagtatgagcgaggcccgtttgcgagcccggggcgaggcggatgatgagggtaaggcgaggtcggctgtgcgtcaagagacaggaagggatggcggccggtatcgaagtggccgccgcatgtacgtacaatcgggagagcaggtcaagagggagcagtcggtgaaagtagagacaaagtgatgaaagtgagaggccactggcgtccgcgccctagtgtaccccttggccggaggacgagcgcgagtactctgattcgccgacggtgagggcgcctgtagggtagaggggagaagatcagcgccagagtcggaagcaagcgcctagttgccagacgcactgttgctgagcttctcgcccgccttgaggccaatcatctcgcgcgcccagtcgcggttgttgctgtcgttgccagccttcgacgcgtcggatcgggagcccgagctgccgtcgtcgttctccttcgaggcaatgcccggccggccgctcatcgacgggcgcgaccagggcttgaggctgaggttgctgaacgagctcggaaagagaggattgcccggcccacgttccgtcatcgggtcagaggcctcgttgccgccatactggaggtcatcgcgcgtgacgctcgtccgccggcggatcggtgggtggaggggaaacgacggcgaagtggacaggtcgtggcttgagatcgagggcgaaacggcggccgaaggcgcggtcgaagccgaggcggacgacgtgtgatgatgctgatggtactcctcggccgacgaggacgagacgattgagacgcccacgaacgacctgcggggcgaccggctctcgacgccgatgcccccgccaccgccaggcgtcatcgaggtcgagagcgggctgctgccgagccggggcgagctgccctgcggcgtctgagcgcccgagcccatcgttgggctcgaaaagggagagatgtcgccagaaaccggtgcgttggccgcggccgagccgacgaggccatgccggctcgggtctgtgaatgacgacgacggcgaaggcccggtcgtgatgagcgtcggcaggccgccaagtccgccgagcgcaccgaggccaccaccgccgccacctagggtccggttcgagtcggttgacttctgccggatcggcttgctcaggccagtgccggttacgtcgtcgtcgtctccttccagctcttcctcctcagactcgccgatggcctcgagctcgccaagcgaggacgccccaggcagggtcgccgaggtcgcggcctcgggcgagaacatgccgccggcgaccatgccctcggcaaattcgtggccgtccgacgacggcgtccgccggccgtcgctgtcgtatcctccgtcgtcctgcgggccgccctcctcgaggccctcgatcaggacgacactcccgctccggccgctctcggacccgccggcttgagacgactcgccgacgaggtggtgctcgtcgtccccccagtcgtcgtcctcgtcgatccccagcaggcccttgagcttctcccacaggggctctgaccggccttcgacggccttgcggattgtgacgacccaggccttgtcgccgacgaccgaccgcggcgtctcggtcaggaagcggacgagttcggggaacgaccagtcctcggcccggttggccggctgctcgccgtcggccgccttcgtctccttggccgtggggctcgccgggagggcgagcgcgagcagcttgaacaggccgcggttgcgctcggcctcgatcagcgacttgacctcgtccggccgctcgtcgaaggggagcatcatgtcgtcctccatcggatggaactcgaccggctcgtactcgtcctcaggtgcaggccggtcagggaacgtcggcgcctgaggcacgatccgatgccggccgccggcactgacgccgagggccgacggcgggtgaccggttgacgaggtccggcggtggttcttgcccgcatcgacctgcccgcgcgaggtcgaccgagcgagctcgacaacctcgcgaggggtgaggtcacgggcatcacctcggtccttaccgctgccgccagagctgactggctgggcagagaacgaggagcgtccgccaggcccgatgccggcgtgcgagctgaaggagcttgcgaggtcgtcggccggtccgtgcacgggcgagtgctggcccgacatgcgctggtcaaggagggtgttgccgggcgactggccgaaggacgagaaggcaaatgacatgcgcgaggtcggcgagcccgtgaaggaacccgagtgctcgcgcgagtggccgccgctggtctggtgggccaggctgccgtgtgacgtgctgagactcggcgaagatgagcccgagacgctcgaccgactgaggtcagacagagggggagcgatctggttcagtgacgagtgcgagagaccgcttttggagggcgcgactgaccgattctcgcgctcgtgctcgccccggctcggtgcgcggacgatcgtcagacggttgaggaagcttccagcctcgcccatgctcgtgctcggctgatgctggacaatgctcgcccgtcggccgggcgagatcgggttagctttcgagagcgagccgtagggcgatccgacggcgagggaggagtgggaaggcgtcggcgacggtccgctcggtgagtgaggcgacgaccgggcgccggggacgggcagcgagtgcgagggctgaaaatgggcaacgaggacgagggtcagccttgcgtccaagaggtcaagaggcactcgagccggatagcaaagggagtcaagcggccgacgtcggcggacgtgatcgaccggtcatcatggtgacctgccaggcagcactgatgtccggcctcttgacacgattcctgcgactatcacgctttctaactctggctggacctagggccggccgggtggggccaaggaaggggaggagcgacgacggcaagcagtcgactcaccccgccatcgatgctgctctcgctcaaggtgtcgagcgcgctgtcgtccttgtctggaccgcgagggatgatgttgagcttctcgagcaagcccgggagcgacttattctgtgcggacgaggggcagaggcagagtcagcatgtgatggcagcgaggcgaaggcggcggctcctcggcaggcggcggcgtcgttcggctgcgggccgtcaaccagccccagacgccttcatcgcaagggacgcaccgacggccggttggccgagcgccacgagtcgatgttggccatcaatgcgaagttgaagagaagagaggagagggaaggtcgaggggtcgttcgcaagaggtcgacgtcgtcggaagatggagcggcgggcgaaggacccgcgcatggcggcggcggcgggccaaggccgcggcgcacgcgcccaccgcgcagcaggccggcagaaggatgacgcaggtcactctggccagctggcgactcctgcttatttccgacaaaatccttcgcaaagaggtgatacgcatgagctggctcaagccagactgtcactcatcgctgtgtgcaaaagagtcagtctcagggctgattgtgcggaggcaagagggctgaaggtcgaggcacacgctcggccgcttgattcacttcctgcactcgcttggcgtcagcagcatgatgtgaatcgtaaaggtgagcattctgatcctctacgcaagtgtgcactgattgacgtcgtggcctgcccctcccgccttgcgactgtcgagttgcgcccaccggccgtctcggcctcccgcccaccccctcccccccccccctctgaccaaccgaccgctgatcgtcgcttatgccctccttggcatcggtagaaagccggtgtcgacctaattgacacctcgagcggcggcgtcacgatcaaacagaagatccccgtcggcccgggctaccagcgtcggtcccttcgtccctcttccccactctgtcagcacggcctgacgtcgctctcttctcgccctgcctctcagtccccttcgcggccgcgatcaaagaggccgtgccctcactcctcgtcggcgccgtcggactcctgacgacggccgagcagattgagacggtcatccgcgaaggccaggcggacgtcgcgctcgtcgcgcgcgaggtcctccgcaacgccgactttgtgcgttcctccccgtccatcgccgtcgtcgttgttgcttgcgctgaacatccgaggacgtcgcgcgtcctgcccttctgcacaggtactcgactgcgcagagacgctcggcgtcgtcgtaaagagctcggtccagtacgagcgggcctggacgcggatggccgaggcccgctacgcgaacgagtcggccttccgctagtagatcccactcaagccccttcataaacgacctccgccctctcatgcccttcttagagatctcatgcccttacagtcgacacatcgtcgaaaggggtttgacccgggaatgaaagggatcggcggcggctgcatgtgacgccggcctcttcgtacgcgaccctgtttccgcagcgcgccgaccctgtttgcctttctttctctcctgtcctcctctctagcaggcacgccagccggccgacatgctattcagctcgacgacgacgacgacgacgacctcggacctcgagctcccctccgcctcagcgacctagttggccgagctgctcgctcgtctctccgttaatccgctcagctccctccgacgccttgcgcccttccgctcgtccagcggtcgtcaccgcgccgtcacatccgccggccccccctctctccgccccgcctcgcagcccgacggacgcgatggcgttcgagaggccgcatcgtcgcctgccgctcgcaccgctcgacaccgagcagctgcctcgtgtgccgctcgtgggcggcgaggacccggctgggctgggcggctgctcgccgctcgagacgctcggtcggagggtcggccttgcgcggagcgatagcctccaggtacgagcccagccgacgtctgcctttagcttgactctggctctagagctgacagcggccctgtctatgcgcgtccttcttgcaggccctcaaggcgagacgcgagcacgaccggccatcagcatcgcatccagccgaccaaggtcctgctgcgggcggcggcccccctgcacccctcgcccggccctcgcccctgatcttcagcgccttccgccgctcgcgcgccagcagcgcaggctcgaccgactacacggcctccgtctactcgaccgccagcggcgatgtcacgggctactgggccgggcctgatctttcggccgacgagcgcgagctcggcctcgggaagaggagcgacgacgacaccgacgcgagcgacggcgggcgcaccgagcggggcgacaatgcctctgagccggaagacgacgacgacggcgacgacaaggacggaagcaccgagcttgggcacgggttctcgctccagccgggctggtcgtcgtacgacgtcgacggcttgctcggcgagtcgagctttgcgaggtcagacttcacgacgtcgtcccgcctctcgcgcttcctcgacgactcgctcttggccgacccgccctcgtcggccctcccggccaacgataccagctctagctcgaggttggacccttcactcctgccgctgccgtcgccctccttcgctcgcccgcgcaagggcagcgtcggtgctgtcgcacatcgggccgaaggcgccgtcgacgtcaggagcgtctacggacaaccaggcgggacatggcaggaccctctgccggcgcagtccctccagcctcccgatccgggcgccggccggcaacggaccgtcagtaacttctcgcggccccggctcggcgcacccgtcgctggcccctcaagtccgacagcagtctctcccgccaactttgtcgcgcccccgcagcggtctgcaagcctccggcaggtgccgcaagtcgcaccccgaccttccccttcaccccggccagagccgccgcggtctgcaagcccgcaagtgcggccctttttcctctcgacccagccttcgggctttattccctttccgcatcaaggttccccgccgccgccatcgccatccagtgctccgcaacgatacccttctcctcctcgatacccggctctgtcgtcactctcttcctcttctcggccgacaggtcaaggtgcctcaatagctccgaccgtcctcctcccttcgcagaacctcgccctccatcattcccagccgtccaagccagaccggccttctcagcagcctcggaacgacaacgccgccccgccctctagcatcctgcccaatcggcgcgcaccactgccgccggtcgaccggccggccttcaatcgcccaccagacgagccgcctgcgcggacgcagatggtccgcatcccgtccaagggtttgaggagcagggcgacaggctcgcgcctccttcgacctgcggctgcggaagatatcctgcgcgtgccaaccccgaccgccgcagcccagccggacaaggcagatcgatcgtcaccgccggtcgactttgagctgcggcctccgcttcgcatcgctcgacaaggctcgggcgagcctccttatcccggctcatggtccgtctactcgctcccgacgacaccgacccagccaggcggcaactacatgaaagtcgaagttggttcgccgctcggctcgcccaatctccaaccgccgtcggcccgccgaacgccgtcgcctcgactcgcccagcagcagcagcagcagtggcctcgacgtcagctcggcccgcagcactacctcgagctcggcctctcgtactttgcgcgcgacaagacggccgacaacctcgcgctggctgcgatgtactggcggagtgcggcgacgatcgatggcggctgcagcggtggtatgctcttgtgcgtcaggatcacctgttgaccgcctgcgttctgaagctgactcgccactttcctgtcgcagctacggcctcgctctccgctcgggctggggcgtcgtcaaggacgagcggcaggcctttgtctttctccggcgcgccgccgactttgtttcggccgccgcttccgacgtccaggccgaagctggctccgaggttgtcgtcgccatgctcgaggtcggccaatgcttcctccacggctggggctgcaagaaggtgcgctcacgttttgcctttctgctctcacatgcgttaggctgacaagtcactcgtcttcgcgtcactcggcaggaccccagcaaggcgctcctctacttcctcggcgccgcacgaaagggcgatcccgactcgatgctcgccgccgcgcgctgcctcgagacgggcgtcggctgccccggcggcaagaagaataagcgcgacgccgccttctggtaccgggccgcggtcgactcgggccatgcgaatgtgcaggggcttgcttgggtttacaagaagaagtgggcgggcgggcacggctgagtggattatcgcatgggtgctgttgagcgactcccggacgggcggcattcagcctcattccagggcaagactgcgaggtctcccaccttaagtgtccgcgatactctgctcgatcggcgcaggcagcgaccacctgtccggcaagagagagtcagcaaccgtcgtgagtgcgtcggcgcgtcggtcgtgtagcgttcgatcgcagcgtgggtctgctgcgcgcgacgggggcgatcgaacgacacgcgcctgctttcgccccggcagcagagcttgcacgcccttgctgctggcgaccccccaaccacctaccctgtccccctcctcttcaaggcagactcacaagtaccggcttcctccgctgtacgaatcctccagcaagctacttaaattcagaccctaagccacggacctcggccgctcttcagccaatccaccacccctccgaccggccggcctcaatctcagctccactcctttcccagccccttccagcacgcctcgccgcccagcatgacgatggccaaagtctcccgccgggaccagcatgccgatttcagcacccaggcccgagccgagcgaggtacgtcttcctccgctactgtctgcttttcgcgacgcttgcccgcggccgagaggcgatctgcggcgtgacgatggggcgccgtaaacggagggaaaagcgcccgccaacgccgtcggtcaacatcaacagacgatcagcacctgcagcagcgggtcatgggcttaggtgcccttctggggagccctgcgactggccggagggcatgctggagactcggtagaagggaggagagacgttgagcaaccgccgtcagactcgcggaaagctgacgaacctcgctccgacgctcacagccgccgcctgcgacacggcgacgctctacacctacccgaccaagaacacgacctttgacgtcgcgtccggcgccctcaccttcaagtgggagccgagcgtgcgtcacctcttttgcatcgagagacggctcaacgcttccccgactgatgacagcgactcctcatctcccttgacctagtgcctctcgttcaaccttgcgatcttgatcctccaggcgcctcacctggcggtgacgggcctgaaggtcggtctatcgcaagggtcctgcctgtcctatcttgctagtccgcgcgcttactcttagcaacctttccgactgcgcagcgtatcgaaggggtcgccgtcgccgatggctcattcaccgtcgagctcgatcccatctggtacggctttatcggcctcaattttggcgtaggttgccttgctgatgcgatgcgcgctcttgcttcgccaggtggaacggagcggcctcggtcgacgtccagatgacgctcgccaacggcgacagctccctgccggcctttgttggtggagttgccgctggcccgctgttcgaggtcgtctacacggcccctcctcagtcgactggcgcggccgcagccgccgctgccagtactgccgttcggaacgacccgatcgtcgtcgtcgtcaacaagcaggcgacgtcggccctccctaccggcagcatctttgcggccgccttcttccccatcgtcgccgtcgcggccgcagctaccttctacatcctctggatccgcaagaagcaggccaaaaagtcaaagcgctggagcgctgctgtcggtcagttcaggctgcgtcggcccttgccctccccaacacgcctgtctgaccccttgcctccgccttctgcccccagaccagcgcatgagccgcatctcgaccgaatggcggggctcgatgcacgagtcgacgatggggacgcccgatatgcgccagagcggcgaccgccggactgtgatgtccatgcactcgacgacgaccggtgcgcccaactttgccggtcggggcgtctaccgcggggacgacactactcccggctcgccctacaccggcgacgattacgccgagggctttgagaagccacctcgggcctcgtttgtaggcagtggcgcggcccgggtctcgttcagcgagggcacccggccgacgtcgacctacacgcaccacgtccggaacggatccaagacgtcggccatcagcctgacgtccgctgctgcaggaggccagacggtcggctcgcgcaagagctaccaggctcccaacggctcgcggctctcgctcggccagccgccggccgggcccgacaccaagggccgctggtctgtcgctgggccggtcgcgaccaaccttgacatgcgcgtcgcgcctgaggccaccccttgggtcctcggcgaggaggaggagcaggaggtccttggaccagtcggtgcgtggccgtgacctggcgctctctctccgagaccgccccagtcgctgacgtctcccgtttccctctaccgccttcagtggccgacatgcccgcccggcctcaggtcgcctcgcgccgatccgagggtgccgtcccgctgagcgtccacccgccgacggcccggctcatctcgcccatgcagtcgcccatcgtcggctgcccgccctcgcccgaccttggccaggcgtcggcttcgtggttcggcatgacgccctcgacctcgcagaactcgctctcacctgacgagaagctccagcggcacgccagcgcccagggcgccgctgccgagaacaagtcaacctaaagtcttcgaatccaacgtctgctcgcacatatcgcacaacctgaatcgtccctccgacaaacccgcaactcgtgaaaagtctttcttctcgtcctctgtcgctccgcttatcctgcgcccgtctgtgctaccctcgcctcctctcgctgtacttgcaactcgatctcgtccactcttctccgccccctcacggacatctttcttcgctcttcgcctcgctcgtcttcgccgcccggttcgtccttcgaggacccgggcgtgccgcctctcctctcctctcgcctcctctttttctcgcatctcgcatcccatgcatactgctctcgtcgacgctgttgctctcgtcgacgcggtgcagacgtgtgacacctttcacggccaatttcccggccggccctctgaacggccaactgcgtcgacaggccgtctcccgcgtctcgggagacggccgccggccggctggctgcgcggatgcggcgattacgcggaccctttctgcctgcatgggcgacctcagcccggtcgcttcttctccttcctcccgccaacacctctcctagctcagaaaaaaagatccttctcgtaacctccagccaagtccatcagctcgaaaggtacggcgttcttgctgccggatgggccaggacgagacgattgctcgtccctccgagggcgctgactatccgagggccccgccagacgctcgcctaagatcgaagccgcagctcgctcaacacatccaataccgcaccgtcttctgctggccaggctgctcgttgagcgtcagagatgagccagaacgtccggatgtacgtccgagggtcttcctgcatcgacattagctctggcgctctgcccatgctcgacggctcgactgagaacgctaacgccgccgccgccgcaacctcctcctgcttcagtcgtcgtggccgcagctcgacagcgtcgagcgtcaaccgcaatctcgtcagcgtcactgctccgccaccgctcttcccgccgacgccaggcgtaccagaccgtcgtgataacctcgccgagggcgatgagagcgagggtgccttcctcagcagctcgagccggcagggcgacgctgcggctgagaccatcgccggccggcgcgggctcgaaccggacgacctgcgcctcccgccgctcgacacgaacgtccggcgtggctcaggtccattgacgtctgcatcggcgaccgcgacaccgcagccgcagcagcaagggagggacggtcggcctaccctcggccggctcgacacagctggcgcaacccggcagccgcctcgtgcgcggtcgcgcaccatcaattcgatcttcacgccgacgtcggcaacgacacctcgcccgtcagcagccactcgaaacgcctcgtactcgctcgcgccggcgcttgcgaccgatctcgacaagaagcacgacggccagcatgtcgactcgccgcacgcgacgcccggcggcggtcatcagggcggctcgtcgtggctacggcgggcgtccatctcgtcctcgaggtcgtccaacaacggcgtaccagtctctctgcgcctaccagagcaagagtcggcaggatcaggtcggcgccgggggacgctcgagagcatgctggaccacgaggacgccctcgaggcgagcggtcggccccggacgtcgtcttgggctgccgcccacgctgtcgtccatacagagtcggacaagctccatgtcggcccgaatgacttgagcgagactgacgaagacgtcgacgaggagcacccggctgaggtcggcgagaaccaccatgacgctatcgtcgatcacctcgactgcatcggtaagcgacccaccttgtggccctgaacgatcgctcgcgccaaccctgacccgcccgctgcgctccctttgcaaagaccccaccgtctcggtcgtgtcgcacctgcagaatgttgcctcgtcgatcctcctgccgggcttcctctcgacccgggcgacgctgagcatccctcaactgcagacgatcccatctgaggtcgagctcagcgactcgcagaagctactcccgccaagttctcgaccggagcagatcaccgaaggcggcgaagacatcgacgcgcccagctcgccgaccggcggtcggaggacgtccgacgctaaggctggccgccgcagggcttcgacgacggcgtcgacaagcggacgggcgcgtggcagctcattgaccggcggcggcggccggcctcgacgagggtcgacggcgacgtacgtcagcctgtcgcacgacgacccgctcgacgcccacgtcgtcgacgtccttacgaagcgccagaaggtcaagcgggcgctgaagggtcttggcaagttcctaatgacaccgctcggcgtcttctttttcttttacggtgagtcctgagtgacttctctcatcgaacgtcgctgataattctgccgcaccttctccaggcatcgccgtcgtcttttggtgcgcgtgcgctttctttctgctatcgcgttcacccccagctgatcgtcactccacgcccgcctcgcaggggcgccgcaatcgtgttcttcctcgccaagtggattccggtcaaggacaagtacacaaacgatctctgggtcgagatctcgtcccaggtcgtcaatggcctctttaccatcaccggagtgcgtgtctcgttctcctacgcctgtgcgctttgtccggttgctgatcgtactaacgctcatgccaaatgctaggttggactgttcccgcaacggctgctcgacacctaccgcatctttacgatctggcggctccagcgcttgacgctcaagcggatgcgggcgcagaacttgccctgcccgtccaacccggacgatctgcccgatccgacgctcgacaaagacttcgtccaggtgggcccggccagtctgtagctcgcgtagcagcggtcgactgacgagctcggtgtcgcgtcccgcaggtcctgtccgacaagcagcagaagcagctactttaccagcaggccaagttttccgcttcgcaggtgcgtgacgcagccagacctagctgtacgccgaacgctgacctactcgcctaccttgcagacctggtaccgcccgcacgagaccgaaacgcaccgggcgttcccgatcaacctcgcgctgctcaacacgctgttcatgtcgctcaactcgtggttccagtgtatgctctgcggcacaatgtgggggctctcggcctactcggacggccgggtcctcctccgcatgggctcgcttagggagcgaccgccctggacgaccggctgcctgatcccactctcgttcctgtgcggcatcgccgccggcgtcatcgtctggaagggcggccagaaaacgaagaaggttgccgaggtggaggagaagctcaagggcgcgctgggcattaccgagatccccgaagagggctcaaacgatgacgacgagaagcactttgacgaagaggctcggaccggcacgccaaaggcactcctcggtacagcttccggccgccgtcggtcgtctactgcagcctcgaccaagctacagcaggcgcaggcccaagccgctgtcaatgccagccatcggccgatcgagctccaggagcagtctcggccagacggtgcgagtgacggcaaggacggcacggcgacgacggccagcagcggcgccgacgccccgagcctgcgtgccgaccggcaaagctttgacgagcgcgacgaggagccggaggcgagtgacattgtcagcggtctcaaggggacgatctgagcacccatttgtcttcacatgttctcttaatgttcgctcgagcggggtaggacagacatgcggtatcaagaaagagaaaggagaagtgcttttgagggcccccgtcgggggggttgaaatgtgagggagagagaatggcagcatggccgtctacaaggggagaatggaagttcgggagcgtgtttcaacgagggagaaaggggcagcgccctttttatataaggaagggtctagacaaatatctacaggcagagatgaaggacgagagatgagacacagagccaagaatggatagagggagagagagagggaaaagaactgcaagcctaaagaaatcgtgaccagagcagtgcgactgtcaacaaccgtggttcgaccatcgctgctggaagggcgggtcgatgacccattcaccctgcgacgacgtccagctggcgggtgcctcaaactgggccggctcgtgcgcctcgtcctcctcctcgaggagcgaccacgtcgcggcgagcgagctctcggccgtcgggccggcaaacacctcggccggtcgtccaacgacatcgaccgactcggcgccgtggtaggccgggtcaacgtacgtgtccgagatgatctgcgtgtaggcgacgccgtcgaagttcgcacgcggcgccgccggcggcatgcccggcgaaagctgcgagcggaagccaaagtgattcggggcctcgtacgagacagcctgactgtccgtgctcggaaagtcttcgtcggtcgtgtcggctgtaaaggcgttgaacggagccgggtgcgagtagtggcctttcggcgtgacggtcgtcatctcgggcggtgtgctcgggtaggccgggtagtagaccgaggggaatcttgaatcatcccaggccgggtgcggggccgctgcgcagttgaacgtcgggtaggggtgtgggtactgatgaagagaggcggacgaaggtcagcaaaaggggctccgcctcagcgtcgtgtgtcaaaccaagcgcacctcggtcggcgtcatgagtggctgtgacgagacctgagcgtagtgctcgttggccggtcttggtatcgaccacgccggaatcgtagtcgagtcgcccgccgacgcaggccacgagcgcggcgagacaaccgatgccgggtaaggccagccggcgggcgactgctgcccggcctcaagcgccttctctgggctcggcccccgcgacgagaggttcgagcgcgactttttggtccgcttgagcgtcttgcgcttaccggtcgccgacttgccgtcgccggccggcgcagactgtgtcgaggtcgaggcctccatcttgctcgactttggtggcgcacgaggcgtcgtctttgggtactggacgagcggcggtgccgtcttgcgcggcgccttaggcttggccggcggcttgacgggcgctggctctgccaaggccgtcggggtcttgcgcgtcggctgaaatctgtagccggggaacatctcggcatgctgcgggcgcagggaataaaaggagatggggttgtcagcacgatgaacagacaatgaaagggctggctggacgcacctcgagcttacggatcgcgctcagctgctcatactggagtttgacctccctgccctcgagcttccacatgacggcgaccatcttgctgatgtcggcctggggcatcgtgccgtcgctgttggcgatgtcgggatgatttttgacggcctcggggatcggatacgtctcgccgcgttgcttggcgagcttcatctgcttgatcgtctcggaccggtagaggatccagctgttgggcggccggggcgtgtagttggctgatcgggccatggcatggttcttcttgctggtcgaggcaatgtcttggcgcgggacgatcggcaaaagggtggcgaagttcgcggccggaaggcctccgggcgacgttgacggaagctcgggcctgatgacgctcgacatggacgacagcttgaggctcgacgtcgaccgctgcggcttgagcgtcgctacatccctcgcttgtggctctgcggccgccggtcggcggaggtggacgaccgggatcgagggcgccgaattgtgattgacgagcggcggccggcggggaggaagcgcgagcgcgaccgggctggccgtgtctgaccgagtttcgtagccaaagggaccagagacgtcggggtgcggaaaaaagacggaaggaggaccggcgtggatctgccacggaggctgcgatgcgagggatgagtcggacgacgaggcagggctgaaggcggttgatggcagactggtcggcgacgtaagagggttggcgacgcgaggcggtccagggaaggggccgagagaaagaggcgagagaagactcgattcgccctcgccgtggccgggcggtgcaccgaagtgaccgttgggaggaagccgttcgggcagttgcagtgacaggagctgtgagagagcgcaggcgattcgggaaagaaagaaaaggacgagagcatgtcagcaaccgagaatagtcggagcgtgaacgtgggactaacagaggcgtggccggccgcgtcgacctcgagcgagaagcggaacgggccgtcatagtcggtcggcgaggaacctgggttgaagtgcagcagcgacggctcggacgagccaaagggcgataagcgagagccgtttccggcgatgtggtacggcgacgagaaggtggcggccggcccgcgagcgccactgctgtcgtctggccgccgcaggaggtcgaggaactcggcggggctgaagagcggcgagagctcagaggtcgacgtgtgcaggaccgaattcggcgaatgggcgaggatcgagaggtgcttcttattcttgctgcctccgcggctctgagctggaagaggaaacatggctggcctactggagggagagggtcgacggtcgagctgagcaggcgaggcgaggctgctgatgggcggacgaccggaagctgcgggcgggccggacgggtcaatcggttgccgagaggttgctgatcgctcgtgtcggagcaagaggtgaagcagggcgggacctgtagaaggctgggcgagggagagagagggaagaagaaggatcgtcgagcgataccgccgtttgacttgcccgtcgcctgagagggaaggagccgaagacgggtcggcaaagaggatgagcagtcgacaaggacggggaccctgcggccgaccagaagtaagcgggccccttccctctccctcgtccgagctgccttcccttctcgagggaccgctctcgcactccagtcagtcaaagggaaacgcagggggcgcgcgcgcgcgcgcggaggggaggcgtcggccgggaggtcggagagtaggagaccggggaaccggtggctgaagcctcgtcctgaaacctcgtagattgtgcgtcgtcgggccaaacgagcagggaccctgttcaacgggcgaggtgctgcgttcccctccactctcgctcctctttgcgcggctcatgttccacgacgagctctcttttactaggctgctcccctccttctctcacacccctccttctctcacgctgcatgagcgagtctacgggcgcatcgttagcttcgtcttgcaaaggaggacgagcgccgcctgcgcgatgacggagggatcagcagcgacccaaggcaagcgtgcgcgagagcccacttttcttgtcgtacgggcctttgtttcggccggcggccccgggtaagcagctggtcggccgtcacccctccggtccgaccgttagccgtggcttctcggcgtcgagagccaaggtcgagtcgagggagagcaggaggcgaaggcgcgcccgcatgggacggtcaaagggagaagaggtcgacgtcgatcgcatctcgtcccgaaccggcagcctgcgccttccgaataggccttttgtttgccgcagatccttcgcaagttggcgtgctgagcgaaatctcagaggaccgacgtctgtcaacagccttgacaggtaaccacgccgtcggttcttcgtcgtctcgcgcgcgctcggcaaacgccgtcgtcggctctccagtacacgatggcctcccttctgtcggcgatccatcgaacatgttgagcgagagtgtgcgcaagccctctgcaggaatggaggccgccgactactcctaatgcaatctcgaccagcccccggggcatgacgcctgctcctcccgctcccgctcctccggttgcctcggctgctgacatgttctagtagcagcacccgggcgccgaattgattcccgttcactcctctcgtggagagcggcccaccgcctgaacgagtggcgttctcaaccgactgactgcgagggctcggcgcgaggcctgggcctcgacgctgacccgaccccttttcctcgccgactgtgtagggcttcacgttcttccccttcccccgcctcgttgccatcaggaggcccaccagtctaattttcgacgtcggctgcagacgacggttccatgagtcggctcagctcttgcgtagacacatgctgaccggcccgactctgacaacggcgataagagcgcttagctgttgaccccttggtgggcgagcgtagcgggaggacgatgacctcccaggtgcgcaagaggcggcgctgacggagggcctgggcgtctgacagcctcctttgtcgtcgagttcacgtcgtccagagaaggcaggctcacctctcccatcccatccgaaaggttatctgccgcggcatcgcacccggcctcaactggcctccatagccggataggtaggccggcgatggtaagaatagccggaagaattttcggcgcgccgttcagcttgtccgagcgtggataggcaaacgcggctgggcaaggcgttcagcacgtcttcgtcctttcgtcggtcagcgagcgaggcccagggtcagcgggcagaaatgcctcctctcccgccccttgcttgccgacccgagtcttgttaagctacctatccgccgcgactcgctgaagcttgaacagcaaagcggacgacaggcagcctccctccctccaggaagcacggcagtggtccactgcgccaggtcgcgacccttgtgcgatgcgttctgattcgtagccgcagactcgacctcggggaggaggtccgcccttcgcccattccatcgccgcgccctcctgttctggtcgctggccgacgggcatttaatcggtcgcaacctcctcctttgcgctgaagatcttgacgtctgttgacggcctaagagggcgcaccattccagagcaacagggtgtcagtcagtcggcgagaagcggttcgcgcgctggactcgagcacggtagtcacgggcaagcgccggccagccagtaggcgcgagctgtcgacgcaagacggcctgctgctcgccaagaggataaagacaaaatgataacgcaccggtcgttgccgtcggtcccgacgacgccgagccgctgcacgaccttcatcccctttgagacgcggccaaagatcgtgtgcttgccgtcgaggaatggtgtcggcgcgagcgtgatgaagaattggctgccgtttgtgttgggcccgctgcggtcgaaaggggatcgaggcgtcaggagggtgctcgagggagcgccggcagcggccgcgacaaacatccttcccagcttgtgccgcacacgcctttcgtttcaagcaggccaccagctagcagcccgctttaagcccggcgtcgcgagacctctgcgcagccgtcgcggtagtgcaggtcggccgctggcagcgacgctcgaggtcacgcagatctgggtagattcctgaggcctccgcgcgtcctgcagagtccgcagcctcgcacgtctccttccaacgtcccatcgactgccccggcccatcctgccgagcgcggcccagccccgaccagcgagcaacaggaaggacgcacgaattggccatcgcgaggatgcccgcgccggtaaagcgcaggcctgggtggagctcgtcggcaaatttctcgccgtagatcgaggtcccgccccggccggtgccggtcggatcgccgccttggatcatgaagtcctgtgagtcggcggagggtcgtttggggcgggtcagcggagggcgtcgacaggactctgggcgatgcttcgggccaaggtagctgcaaatcgtcggcttcgccagcccgtgcaagggtgaggcctacgccaggaagcgctgctcagaccggccgcctaacttaacgtaagagcggcgcagctacagccggcagatggcctgacagcgacccgacgtgacccctgctgccgcgcaggagcgagcgttttggaagagcgggacgcacgttgatgatccggtggaagacggtgccgttgtagtagcccttggtagcgaggccgagaaagttcttgcacgtctgtcgggccgagcacggcagcgttagcttgtccctgcggattgacggcccaggccgagtgcaggtgctgctgctgcgagccggcgaggggtgacgccgagccacccgcaaggaggaacgcaccttcggtgcatgatcgacatagagctcaaaggtgacgtcgcccatcgacgtgctgagcgtcacgtatcgcggcggggagggcatggttggagggacgagagagacgcgtcgaggtcgggcgttcagagggagactgctgaggttcgagacgggcggatgcaggcggctgttgacgggcggcgagccaagaggtcagcctagacgtctcattcgcctactctacgtcgtacgaggcgctcactgatgtgagatggcggcggatgagctggttggttgcgagagtcagaccaggtcggctggatggtcggccgagtcggccgctggatgcgtctaggcaggtctcatgcggttcggccgacggccggcactgcactcgtcgtcatcgacctgcggctgcgagagggtcaaccctactggcatctccgtctttcgccctctcaacccatcaaccgtcacacctctgcctgcctgcccaccatcatcgatccaccctacagcatgtcttccgcctcctccactcgccagcgcaagactggcggcctttcggcgaccgactcggacggcgtcgaccactcgaacgccgccccgcagggcaaggccatcaagaagacgcccgtcagccagtgtcggtcctctcttcctgtcctttttacgattcagcctacgactcagcctgggtctgaccctcctccttcatcctgtcgtacagtcaccggacggctcgtcctcgccgtcatcgccgtctcggccttctacatctggtgcgtcccccttgagccgtctgccgtccttcccgccatcccgctgtcgccgcagctgacgcgcccaaccgaccctcgtccttcttcttaggcgcctctcgctccagtctgccgaggtcggtggttggtggaacctgatgaccggccacaagccggtcgcccagcccatcgccgaggtccatcctctccctttctctagctgctccgacctcatccgtcccatcgcgctgacctgcgctgtacctgcctttgttcgtctcctgcagcagaaggcccaggcttccgctgcttccgctggcgctgccgccggctcaaacccgaccggccactttggccgtgaggagacggtcgagagtcagattctccgcctcgctggctcgctcggcgtcaagtccgtccctgtcctgccctttcgctcctcccgctcgccttcgggacaccctgctgatcagccctgccttacactttctctcctgcaggccccgccagctgaccgaggccatcgccccgctcctgacgccctcgctcgtcgccgactctgccggcaccggcaccggcatcgactcgaccctgaccgaggaggaggaggccgccgcccaggctgcccgcaccgccgaggaggagcacgcaaagcaccacggaggcgtcactggcgccgtcgctggtgccgttggcggtgttggaagcctcatcgacgcgcttgccgactaaagcgccgtgccgagaaagggctgcagagcatgcggcgcggctcaggaggagacgagagaagaagggaaggaaaagaacacgctcgacgcgaccacactgtatcttacgctcctcaccccgctggttgccgccctgatcgtgcgcgagagaacggggagccgtgaaatatcaaaggcatgacggacgaccagcgtccaccacaagaggggggagtagagaaggagggccggcctgcccaccctctcagagcttgtacgtgtactccttcttcggcccggcctggaccgcctcccactcggcgacgtcgtagaaccaggtgcccttgcctggtgcagtcgccgggcaatggaggacgttggacgagtagacgtcggacgaggccggatcaagcgtgtagatcgtctgcgagggcgtgtacctgcaggaagggaaggggagcggcgaccgacggccatcagcgcttcgtcatcaacaagtgagcggcgaggaacgagagacgcaccagacgtagtgcccgcccttcgtcttgccatagttgatcttgacgcgcccttcagcgacaaagaagcgcttgctcaggttgatcgacccggcctggcccggcgcgacggcgatcgactgggcggccgacgacgtccgagtcgtcgaccacgactgcgagaaggactgcgagacgccaaacgagaagccctcggaggcgatgccgatcgaaatgtcggtgccgatcgtgagcgagttgccgacggcgagcgagtcggtgaccgtctgagtctgaagggcggtcgaggaatggaaaagatgcaaagatcagtcagaggacaaagcagcagcagtcaaagagcgctgtgacttacgatggtgccgagattgttctcattacaggcgtcgtacctggagggacgagtgtcagtgtccgctcgtcacagcgggcggcgagtgctgctcaccagtcaccgtattgcgtccagcgtgcgagcgtcttctcgtagacggtctgcgagagagatgagcaggggggtcagcgagagcctcgcgatcgagaaggcagacacacgcacggtcagctcgagcgtgcatcggtcggcgtccccgattctggcaaagcgcaagtggatgcgagtcagccctcgcgccagtgattgtcgagcgcagcgagaggaagggacgtacgagcctccaggacagtggtcgaggctgccccagtcagcgcggacaacgaccttctgcatgcgggccggcccggggcgggaggttgcgttggtcgcctgtgccagggcgggcgagacgagggccgagaggctgaggacgagggagatggaggtggcgagcattctggagtggtggagaagagcgaaggcggggaagagtggggagatgagggagggatagagagggtaggcgaccggtgactgaagaataggctttgggccctgctggaggccttgcctttataccctgctctgacagatggaaaggagtgagtagctcgccaggagagtcttcagaagcattcttcaggagcaccttcatatgaagcccgctcctaagactggcagacacgaggcacgaaagtgcatcgcgaaataggaggtcgcagcggacctccttgagcagccggcggctccgagcggacggccgcagagagacagcgccaccagaagaccggtttcgactgagaggagatgcactcctctcgcttttttcgactccgcaggtggccagagaggagcagagccgatcaaggtcgatcgattctggggtcagtcgacggtcagtcaagggctgcgcagcgtgctctgcgggcatgagcgcagccagttgccagggatagaagccaggcccgacctcctcgcctgagtgattgctaaggagtgtcagccacgcctcgactaccgtcggtactggagtcccagacgaagtcaggccgagcaggagatccgggttgggggtcaggggccaggggtcgagtgggcacgcacgcgcacagcacgcctgcggggcctccgagccgagcgagccagacgcaaggggtcgatccgagcggcaggggtcagcatgttgcgagcgccgtcgtctactcgagagacgtgctggtgtcttatcgagagctgacgatctggtccgtccggtgagtgatcggagaaggatcgccgaacgacgccttgattaagccggccaaggtgacgagctcgaggcccggcacgaaacgaaagagcgtttgctgcgagagggcacctcctgaccaccaccaccgacccattcctcacaccaccctcagacttgcaagcagttccctaaggacgcccgcaccctgccatgtcgatgctgcccccggaccactttctctcgctccggccgtcgttcgtgcagggcacgctcgcccacccagactcgtcctcggccgcgccgtcgacctccacccttgcctcggccgactacgaggtcgacgtccggaccggcttcctccccgccgagccgggcctgctggctgtgcccgagcgctacgcccagtgggagtcgctccttgaccgggctcgcgccggcgccgtccgcatcggcggcatcggcgaggataaggcgaaggccgacgcttggcgcaaggaggtcgagcaggtccgtccgtgtcggccgaccgcacccgtctaagcagaggctgaccactcggaggaccgtgcgccaccagatgcatgtcctgcgcctgccccaggagcacctgacggcaccgatcctccaccggacgtcggtcacgctcgctttcctcgaacacttctacgttcactcgcaccgcgcgccggtcggctcgctcgccattccggcctcggtcgcggttccgctcatccaggtctctacactgctcggcctcccgccgatcctgacgtacgcgacgaccgtcctctacaacgtcgtcccgcgcgacccgacggccatctttgacgcaaagacaaacccgcctgtccgctgccacgccaactttaccggccttgcgtccgaggaccagttctacctcgtttcgtcgctcgtcgagctccatggcgttcgggcgctcgacatcatgcgtcaggcgctcgacgaggcgttcgtcggcgaccgcctcgccctccgccggatcaccgcctacctccgtgcgctcgccggtgcgatcgacgacctgcgcgacgtcatgaagacgatgcgtgacggttgcgacccggccgagttctaccacctgatccggccttggttcaaaggcagcgacggcgagggtcccggcggcctcggctggctgtttgagggcgtcggcgatgagggtgagggcgagcgccggatcgtcagcggtccctcggccggccagtcgagcctcgtccacgcgctcgacctcttcctcggcgtcgaccatagcccgcgaccaccatctgatcatgccggcccgccgtcatccgctgccggtccctcgacggcacccgctgctaccgccttgcctgcggccaagcccgtcagcaagggcgacgcgacgtttatgcagcgcatgctccagtatatgcccggcccgcaccggcagtttctcctccaccttcaggccaactcggtggccgtccgggatctcgtcctcgccaacaaagactttgagggcggctcgctcgctcgatcatacgacgacgccgtcagcgccatgggccgcttccgcgactatcacttcgtcatcgtgacgacctacatcatccagcaggcccggcggccgcctccgtcccacatcctcgcgctgatgaaccctgtgccagccgttgccgaagtcgtcgagaaggagacggtcaaggcggtcaacccggcctggcggctcggcaccgagaagctgctggcgccggcaccgcctccagcagaggacgaggacgaggccgccgacgagcccatccgcggcaccggtggcacggcgctcgcccagttcctcaagctctgcaaggcccgcactgtcgaaaacatcatcggccgcacccagtgattcctctcgcctgcgctccctcctcgtgatctccgcctgcttccttgctcgactccactagatgctcaacgattccctcgccccacacttatgacctgctacgacccctcctcttacatgtgctcttcgatcctatgctccccctttgtctgtgcttctcgagcgtatgctggcgagcggcctatttgacgcgtcggccggcctgcgctgagtcactcgcacgccactcgggcattgcgatcgacctccttttgccctccgaccttcaccttcaccacctcctgctcccgttgtactctccctgctgtagctccccaagcttccctgtgggttcacgcgcggaggtcctgcatcgcaagttgtagctctgaccccttcccttgctctggtcagcccatccgacccacctcgcgttggcctgacttccttcagcccacgctcgaccgaccgacgtctccgcccaccccgtgcgtacggagctctggcagcaggagcactgagcccgtgctgacctgccccgaccttgccgacagaacagctcgcgatcatgccgtccgtcgccgcccagctgacacagattcccgtcggccggtcgatacccgagatcctcccccacgcgatcagcgtctcgctcccgacctggaaggacaatgttgcgtatgaggagggcgagctcggcgacgtcatggtcaacggctacccgcgattctttgtccacctcagcattcaaaaggtgagctctggctcgtctgactgctcgtgcggggtggagctgacctgggaagccgactcgcttcgcagctcgcggccatctgcgagaagaagttcggccagccaggcgagctctcgatcctcctcccgacacatgtcaaggccgagcagtgccgggccttcctgctcgcccactcgccgacgcccatcaagccgcgcatcgttcatttcgccatctgcgcttcggccgacgggccgcccgctccggccgaggccgccgcttcgctcaaccctgacgtgatggatctccagatcgtcttcttccccggcgcgagctggccgctcggcaaggccttctggcaacacgccggcgagggcatcagctcgcgccgcgccgaccgctgcctcgagctcctgggcgagtcgatccccggcagggaggacgcccagctcgaggctcaggctcggatcgccgccgccgagaaggcagccgcacccgctccgcctcaggtgcccgtccggccgatctcgtactcgaagaaccggcactactcgcgaggaggagcggcagcgccaacctcgctctcacggacgtcgtctccggccggtttgagcacgagcggcggtgcgcagtcgaccgcgcagcccgaatcgcagcagcagcagcagctcgcagacgagccggcaccggaccactcgctctacgttgagcagcgctacggccgcaacctgccgactggctcggccgagattgcgaagcaggccctccggcgacggattgccggtgtgctcgacgccgacgagacggcgactgacgggcggcggatcggcgaggaagacgtttggcttttcccgaccggcatgagcgccatctacaacgctcatgtcgcatgtctgacggcctggaagggccaggagaagatgagctcgtgcttcgggtgcgtctgcggcctgatccgtgtcaacggctcgcgctgactctcgctgacctcccgtctccagcttcccttacaccgacacgctcaaggtgctcgagaagtggggcccaggctgtcacttctttggccacggaaacgaggccgactttgccgcgctcaagaagctactcgccgacggtcgggcggcaggagacgaccacccgctccaggcgctcttctgcgagttcccgagcaacccgctcctccgctcgcccgacctgctccggctccgggagctcgccaatcagtatggctttgtcattgtcgtcgacgagacgatcggcaacttcgtcaacgtcgaggtcctccagtgggccgacatggtcgtcagcagcctgaccaagatcttcagcggcgacgccaacgtcatgggcggcaggtgaggccttcgtcaggctttcgtcttcctgacttccctttggctaatctggcggtccttctcattgcagcctcgtcctcaaccccaagtcgcagcactacgagctcctccggtcgacgttcgaccagatctacgaggacacgatctacggagaggacgccatcttcatggagcgcaactcgcgcgacttccggccccggatcgcaactatcaatcagaactctgagctcctctgcgactttctgcgtgcgcgctcgctcgccgacgacacgccgccggccaacgccgtcctcaaagacgtcttctatccgaagtggtcgacagccgccaactatatccagtgccgacgtaaggttccgcccgcggccgacacgaccggccggttcggtggcctcttctcgctgacgtttacgtcgacggccgcgagcgaggccttctacgacacgctcaactgcgcaaagggcccctcgctcgggaccaactttacgctcgcgagcccctatgcgctgctcgcgcactacaccgagctcccctgggcggcgacttttggcgtcgacggcgccctcgtccgcgtcagcgtcggcatggagccttacgagtcgcttctcaagtggttcgaggaggcgatcgtcgcggccgaggcgaccgacggggcggctgccgcctgagggagggtagcgtatgcatggcgacgaacaacgctcggctcggtgctcaggtgagggactcgtcagtcagcgacctgcgaagtggtgaaggaagaacctacgcgaactatctgtgactgaagggaccgctcacgcgacgatagatacttgatcagcctgagggattcaaaaactgctggtcgtcccctcgcgcgcggcggccgcaaagcattggccattgcttcctcagcggcggacgccttcaccaccacaacccacttacctcccaccgcagaaggtgcgtctcgttgatctggaaccacgtcgacagcaagaaaggccgtactgaaagcaagactgaccgttgcctctgcttttgtctctgctcccctctgcccgactcgcccttcgctcgcgccatcgccgctcgcctcctcgctttcgctttcgcgcacccgtcaccggctcgtcccatcggcccttgtcccacggctcttcctctctttcatctcgccctttgctcgctcgccgacccagactcgggacaactcacagcaatggctctcaagcgcatcaacaaggtgcgtctcgcttgcatcgagggcgtggtcgcgcgaacagggcggtcgccggagcgccggagcggcttgctcgcaggtcggacgaccttgagcagcgccgaccgtagcaggccgtgctcgcatggagcagtcccggcattatcggagctctggcgtcagctggcatcggcagtcgcagcaagcttgctgcgactaccggagggagcgagcgagaggatgtgctggccttgttggccgggcgcaccatctccctgcggccggcttgccttggctcgcgaacccaatcatctcctagaggccatcgagctgacgatcaccgcctcttcgtcgcttcctgcaggaactgatcgacctcgggcgcgacccaccctcgtcgtgctcggctgggccgaccggcgacaacatgttcaactggcaggcgacgatcatgggccccgtgcgtcgccctttcctgtttgcgccaggccttctcgctctgttgctcaccgccggctctttttttcgacttcctcagggcgactcgccgtacgccggtggtgtcttcttcctccagctctcgttcccgaccgactaccccttcaagcccccgaaggtgtcgttcacgacgagtgcgtcccgccatccctcagtgtgcgccaacgtccgcagtgcaggcgctgaccgtctatcccctgctactgcagagatctaccaccccaacatcaactcgaacgggtccatctgcctggacatcctgagagatcagtggtcgcccgcgctgaccatctcgaaaggtgcgtctcggccagctgcgacaggagctcggccttgaaggctgactcttcgcccggcccgcagttctgctctcgatttgctcgatgctcacggaccccaacgccgatgacccgctctcgcccgagattgcccgtgagtgccgtaggaggccggctatctcgtgacgccaccgtcggtcgctgacgaagccctcccccttccgcctgccctgccagacacgtacaagacggaccggccccggtacgaggcgacggcgcgtgagtggacccggaagtacgccatgtaaacacccccaaaccaggctcctacttcacgaccaccgttcttgcgccctccggctgtttcctccgtccacgacccacaccctacccactcttcctccctcctttcaaccgactgataaacaaacctttcaaaccttcttgctgccggcgcaagcgacgggcccggccttgctctcgcccgcgtgctgcaagctaccctgcgagccttggctcatcctatggcgctgcgctgcttgcatttagtgcgctgacgcgcatggcctcgacgggcggcgatgttagagagccctcgctctggagtgtccgtccataagctctcgcgctgagctggagctctgagagcgccgggcgacgagtcacatgcgaagcgggtggccttgacccgcagcaacgccgtgcagccattgcgacgttggcctgcgctcgacgacgactgtactctggactcaacactcactctgtttcgtctcagccacctgaaagctcgctctccctccaagcgggtcgtgtcgcacctcgaattagaccgagctccatcttacgctcgacgctcgctcctctcgccgaacgcgtcggttgaccgaccggagcggcagtccctgactcggccatgcgacctcgcccattgcctcccatcgcccaagccctcttcgacccgaggaagcccttcacaccaagaacgcttgctgcgatacgctcgcgcctcgctgaggctgaagaggcagcagcgaaggacggagggaggtcggtcgacccgtggacggcgcggcttaagccgagagggcacggcgcggtgctggcgccgctgctgaacgttgctgatcggtacgtgctcactgcactctgaaccaagggaagcctggctgattactcttttgcctgactgacgcccctgcagaccctgcatgcttcttgagctgcgagccggtcacatgcgtcagcacgccggcgaggtcgcgttccctggcggtcgagtcgacccggtgcggtagcgccgaacacatccctcgaatttcgctgggaggctgacagtaccctgttctgctcttccaccagacggacgcaagctaccgcgatgcggccgctcgagagacgttcgaggaacttggcgtagagcccgcgcagctaacccatctaggcatcgccggcgagtcatatgtgaacaaggcgggaaccatgctcgtccacccctttgttggtgagttctaaacgtcattactgcagcttgtcgctgctgacagttcgccttgctcagcgttcgtccaccctcttggcgctcgaccgtcactcgcggcagacgacccgcttccctcactcgacctctcaacacttcgatgcgagcccgacgaggtggagcagctctttaccgtccctctcacggcatttcttgatccgaatcgactgcggccttcgacattccgcgacgtccagccgtgctggaacgtccgcgtcggcgacctcatgaacgccgaaaggaaagacgagggcgacatgcagcgagaggagatggagatctggggcctcagcggctggttcatgaacgagctgctacgaagtgcgtacatccaacagctctcatactaggattgtggctgaccggatcgccgtgcgcgcgccactgccagccctccgcctgtactaatctagacgaggacatgaatcttgacgatctagagctccggccggtcgcgactgtcggccatcgtcacgctgcctgcgaacggcttctggagaaccgggtagaaggcacagagcgacgacagcgccatggccgtgccgacgaagaggatgaggggagcgtacgcgccgtcgtggacgccgtacgccagggcggcgcccttgaaagcggtcccgaccgagctcttactgagaagcgcagacgagatgggcgccgtcaggatattgccgacgccacggcccgcgacaaggagggcgtctgaaaaagacaaaggcatcggtcgtcagctattggcctcggaggaatggcaacgagccgacactcacaaagcaacagcgtctgtcgtggtaggcgggatgtcgcacgcaatcagtcttcgagataccatcgacgtaagagctggctgcaaggacacacctgcgatgggtcggtctgcatctttgcgaccatgctcggccaggcgcccgagaggctgggcgcaagcgagccgaagaggatgccaaacgcgaggaggacgccaaacgaatttgacgatccccatacgaggaagacggcgacagccgaaccgacggtcgagatggcgatcgtcgccggcagattcttgtccgagccggcgccgatcgcgatcaaaccaaaggcggaaaacaggttgagcatcgaaaggcagagcgtgccggtcgtcgttgagaggccgatgtcgcttgcgaaggatggcaggaacaggacaggggcgaagtttccaaacccctgcacgacgttcccgactgtaagggagaagctcgttctcagctttgactcagcgccgagacgagaaggtcagacgcactaaagagacaccaaaagaccttgcttttcaggaagccaaggttcgtccttctcgtgccgacgacctgcgccggcggcaggcgcgacttaacgaacggcagcgcgagcgggacggtgccggcaaagacgccggccagaatgcgcagcgtagttttgcggccgtagtgactgagcaggttttcgatcagcagcgggaaaaggacgccgccgagacctgcaatgaaacggcgacggcagcttaacggggtcagccatcctgccccccctcccctcgcgtgtcttttggactattgcgcaccggtaccggagaggatgatgccgttggccaagcccctcctctcgacgaaccattcccacaagaacgtgctggaagcaaaatagagaagcgtgccgccgagcgaataaatgacgccctgcgtcaagacgagctggagcggggtattcgcaaagctcgcgctgacgagtccggcgatgcctgacacagtaagcagggatcagtcacgactcgccatgtagccggaacgagaagcgctgcacttacaaagggcgagaccaacccacatgccggttgtccgccagcgagggtagcgggcaaagagcggcacggcgacgagcgagagaaggtaaatcaagcccgagccgatggaacctattagtgggaggagtgtcgacgagtttccgtccgggaagacctctcggtaaaactggaggaaggagccgaaggcgaacggcgggccccatactgccgggttcggcatgcaacgttggctggagtcagtccggcaggcgattgccctgctttagatgctcgacgcacccatcagctcgatgacgaaagcgcccgccaagaacgagtatgctccgaagcctcggtcctgagaagataggtgcagtcggacctgtcagcgccgggcggtacgcgagctgcgccgtctgcaggtcgaacgcacgacaggcggcagcgccgagatgcccgagccatcctgcggctccgtgtcgtccccaaacgtctgccgtccgccgaccgacagcgcgctgcctcgcgagcgataggttggagggcgagagggcggctcggctgcgagatcgttgtcgtcgttggccgacgggagccgggccgtcagggcgtcgggcgccgcagaggtattgagagtcgcaagctcgaacgcgccgtcgtcgtgcgtcgcaggctggaggatgtgcgacattgtgtgcgaccaaggcttcttgcaggcaggagacgatggctgttggaggctcgagaggaggaaaagagcaaggggagtcagacagcgggctcggtcttgtccgccgcggcgccggttctcgcgtcagcccttctgatccgccttgagccggcgctatcgtcttcttagccgcggccgcctgtcaagagcacgtccatggctgagctggcagacagatcacgcaggctggcaggcgtttcttgacaagagccataaggtctttcgagcgtgcggtctttcacgcacgccttcagtctacgctacaacaatccttctacctcaaccctcagacgcagacgagtcggccgaccccgctcagacctccttggccatcatgccctcgaacttcttggccttgccgtccttgcactcgctagtaggagagaaggatgagatgggtcagcatcgagaggagggtgagcggctcgaggcgcgcgagatgggcccggtgcagagaacgagaaggacgcacgacgaagccgatccgaggagggcacgctccatgtactgatggagtgcgagcggtacaacagagatggcacgtcagcaaggcttggagcgatgacgcctgtcgcctgcgaggaaatgtagcctgaagacgcacgatctcagcctgaggcttgactcgagtgatgtcgtcgagagctccggcctgcgcgagaagagaagcgtggtacgggcggtgggacaatcgttcggagcaggaggaagagaaaggtagacagaaggtgtgaaggtcagctaggtcaatattgcgctccccccctgcttctctcaacgaaaataccgacgcaccttgacaaaggtcttgtccgggctggacgaaggcagcgacatgagggccgagccgcagtcaccgcagaactggcgctcaatcgacttgcccgagtcggttgtctcgtcgacgtacgtctagcgagggcgtcgaggtgggggcgtgagaaacgttgtcagttcttgcgtactgcgcggcaagccggccgcctccgagacgagcagctcttaccttgggctcgcccttggtgtacttaatgtcggcccggttgagcgcgacgttgtacgagaggagcgtgttcatcttgcggcacgtctgagagagagtatacgatcggcaggagcagaccgagcgcgagggtcgggcaagagcaagggtgaactgtcagtcatgctcctctgcccactcagctgccgtgtacgagcaggcaagccggctcacgcacctcgcagtggcagacgatgccgccgacgggctcggcgccgacgttggcgatctcgaaggcgatggccttgcagtggcaggaaccggtgagcttggagtcggacatgtcgggctataagaggggaggctgatgaaaggctggaaggaagagcgagcggtcggtcggagatggtcagaaagaagcacggcttcagcccaccagcccgaccttatggctccctccgttcctcttgctcgacgtcacgcgccgcaccggcgtctgaagacggccgcctccaccagggcgaacggagacttggacgggtcttgtagccgacgcctcccgccgccggacccatctcgggtcgcctggcggtcagtctgtttgggaacaggccgagctcctcgtctgacgagtgaatgtcagcgatgagcgaggagatcgctgctcgaggtcctgcccgacggggtcctgcccgacggcggtggggcaggagcgagcgccaggctcgggagcgcggtcggggatgcgacaataaggcgcagacgaccaggagctcctctctttacctcaaccctgctctcgacagctctcgaggccgatctagacggcacctactcgacgagccggcaggtagacatgctccgcctttggcctcggacttgcggctgctcggctcgcgccagcacctccgccctccgaccacctccgctccgccgccggccggcctcgtcgagctcgagcgcactttccagcccgacttccgactcactcaatctcgtcccgccgcggctatcgtacgcagacctcctgacgccagcaggtatcgaggcgctcgtcgccaatgctttgcttcggaacgctgcactcgagccgacggcgatcgagcgggcgagtgctctcgctcgtcggcggaaggaggtcatcaccctgacgagcgtcgcacgaagtcgaatgcgagaggccggtctccgggttaaggcctgcgaggagggcgcgctcgattctgccaaggcgcttaaggaggagattcagcagctcgaggccgaggcgactacggtcgagcgcgagctgctcaacctcgccctcgtcatcccgaacacgacctcggcgcagacgccgcccgggcctgaaggcaacgccggcctgctggcctcgcttggcccgccagcggtcgaggcagacaggaatcgggaccacctgacggtcgcccggacgctcggcctcgccgacttcaagagcgcagccaaggtgacgggcgccggcttctactttctccgcggcgggctcgttgtcctcgagcaggccctgatctcgtacgcgctcgacagcgcgatgcggcacggctttgaggcctcaacctgccccgatgtcgtccggaccgacattgcctcgcgctgcggctttgtcccgcgcgaccgggacggctcgtcggcgtcgtaccacctcgagtcgccgccggcagcagctggcagcgggccaagccctcgtctctcgctcgccgcgacagccgagatcccgctcgctggccagtcgttcgacacgctctatccggaggagtcgttgccgaggcggacggtcggcctcggcacagcctaccggaccgaggttggcaaggggagcgaggtccgcggcctctaccgcgtgcatgccttcaagaaggtcgagctctttgtcgtctgcgagaacggccgaggcgagagcgacgccgagatggaacgtctgctggctattcagcaggagatcgttcaaggtctgggtctgactgtcaggtgcgctgccttcatcctccttgcgtcgacgttacggccgctgacccaaccttgtctctcaggatcctggagatgccgagcgaggagctcggtgcgagcgcctaccgcaaggtcgacatggaggcctggatgccaggcaagaacgcctggggcgaggtgcgcctgttcgctgcagccaccctggcagcccttcgcctcacactgaccgttctccctcatcgtcaggtctcgagcacgtccaactgcaccgattaccaggcccgccggctgctcgtcacctaccggccttcccgacctgctgcaggcgaggacaagacgcgctttgcgcacacgctcaacgggacggcggccgcgatcccgcgtctgctcgtcgccctgctcgagaacggcgtcgtgcttgccccgctcggagcggaagcactcgccagccgagcgagtgcgcaagcaaagaccttggctgggcagaaggggcgcaaggtgacgaagccgatggaggatgagcttgagggcgtcgaggttgttgggttcaggctgccggccgtgttgcgtcggtggtggattggaccagaaaatatgggcggcaagccaatcgaatggatgtagtttgtcgtactcgcatcaaaagatcaacaaagaaagagggcatctattaaaggaccgggaacgatagagatgaacgaaagaatgaggtaggacgatctgcagggtaggcgaggcacttttacaccgacacgcggcgcttgcgggtgctcggggcggcggtcagggttgccgagggggcgctgccggccgtggtgatcgggacggtgcactggggggcgccgacgctgaggttgcgcgaagaagatggtggcgcgggtcagccgaggaatacgaaggacaggcagtggctcgacgcacttggagttgccggcgacgatcaccggctgggttatggacgggtggccgacggccttgatcagcatgggaaccatgccgccggtctggacgcggaagactgggtggccgagcgcgcggaacgaggactgccaggggtggaaggggagccgtcagtgccgacgtagtgatggcgagagaggagcaaggaggacttacaccgatgacgcccgagtggcaggcaatgtagatgaacgcgctgtcgtcgttcgcaaagatctcgttgtaaagctgctggagccggagcgtctgctgctgaggcgtctcctggaagccagacgtatactgcggggccgttgaaggagggccgagtcagcgtcaagagcaaagacgcccccgggtccagcagagtcaactgaccagctggtcattctgcgtgaacgacgcctcaaatgcccaagtggggtacatggcggcgatctcgctcttcttcgaccgctcgtcgcaggtgtggaggccgatcgactcgcggaaatgctccttaatgagcggcgtcaggctgccgtctttctttgcgtcgaggaggatgtcgctcctgagggcgaggggcgatcgcaaaggacacggagcgacgtcagtgggagctcttcaaaccagcaggacgtgagacaagacggaccaggtgatgttgagcgttgccgtgctccgccgcatcgggctcgagtagagcacctgcggcagcggaacaccgccgtcaatctccttcttccaggccttgttgttgacgtaggcctggttaatacccttgggcgtgagcgtcgcgtcgttccacgtgttgttgccgtcgcccgtctggagggaccagtagcagttccaggcgggggtgccgtagaacgactcggcctggttgtctgcagtgcagaggaaaggacgtcagacgacgaagggcagtcagcaagtgtgtcactcggtcgatcaggaaaaaagccgggagaggacgtacgatagccttcgccgtggcgggcaatgtagatgactttgtagctcgtcaggtcgtccgactcgtcgttaagcttcttgacgtagctgcagcataggtagcgagaccccggacgtcagtcgtcggtcgcagggcgcagtcgagaaaggcggcgtactcagtcaggttctgccaccggccggtcgacttgtcgacgaggccaaacgacgaggctgggtcaaagacgtcgaaggtcgtcgggtcgaagcccttagacgactgcgtagggagaaaggagtttgggtcagcttcattcgaggttgaccaggcacgtctggaagagacgggcaagacggacctggatgaagacgccgtcgacgacggtgtagttgctcgctgcgggcggttcaggacgagacgtcagcctgggtaagctcagctaagaggtgcccctgagcgctagcaggctacgcacgcgcaaatacggcagttcggacgtccttcgtcgccggcggaccaggaggcttgccctgactgtgcgggccaccaggagcgtgtccgggcggtccacctcctggaggaccatggccctggccctgaccgtttccgtggccgtggccgtttccgggcgcggcctgggcaaaggtgagcgaggggttgacggccgagaggccgagaagcgaggtaaggaccacgagcgagccgagcatgacgagtgtcgcttttgagattgaccggtctggaggggttggagtagggtgagaggaggttttggacgacgacgggagagggtcgtagcctgcctcttcggcgccttttgaccggcgagcgtcgagaggacggcttgatgtcgtcctggtcattgcttgggtgaacgtggttcggctggtcgtgtcgacgatctgcggaccagcgagaagagttgctgttgctgcgcgtcgacgcgtcgagggtaaaagcaacgagactgtgagctgattggcttgaggatcgggccggtcgcaaagaagggacgaacgtgatgaagccgcgctctgctgcgcgagaggcttggtgcggggccgacgagaggcagcctagctgagctgactattcgccgggagaagcagtctcgggcgaccaggctgacctcgaaggagggtggttctcgtcgaaccaggcgaatgggtcgagctgggctggctcgagcgtgctggctgtgaggacgggagcatgcgaggtcgaggcgacggaggcaggtcgacgggaggcgcgtggcgacggcggccgaggattatggtcagcgagaagccgtctttcgtcgaccgacagcggacgcacgagcgtcgacggacttcgacggagagggagaggctgtgctgcgtagggctgctactcgtgctggatcgacggcgatggttgaggcttgcttgcgaggtggagggcttcgcttcttgcgaccgcgccgccagccaaagctcgtcgctcgtcctcgctgcgcgcacgtcgttgcgcccttgaccgcatcgtcgcccgctcatccgttctgcttttcgtcaggcccggacgtgctgaccagcgtcgacgagacggtctgccatcgctcaaggctgggtgactcgcagctggtacaacgaggtcgaggaggcggctcgcgaagtcggcagcctccgggccaggtgcgtcgcctcaacccttctcggctcgcgctcgcctccgactctgcacccgccctccgtagcgcttaccctacgcggccgaggagcaatgccatctcgagctcggtgtgccggccatcgtgcgcaatctggttgagagtcgccggcagacctcgagcgcatccaggcgacgcctgcaatgacagagatcggccggcatccaaccagcgtcagtcgccctcggctccaagcttcaaggcggcactgacctggttggcctaccctcaggtatcggcggctgtggcagcaggaacgaacgatcgggagagaagaagcgcgactctgcgaatgccggccgagggcgagcagggaggccaagctgcgtggccctagcgacctgtctaaacacgcgcttcgcttcggtacatctcccgtccgtagtactttcggctcatgctgaagactctcgtgcgaccaacctacagttctctctcgccgttgtcttcctcgtcggctgccgccgccgccgcctggcccggccgcgggcgttcgcctcgtgtcgcctgccttgtgccggtccggctgacccgctgacctcgagcgctgctcacccagagcgtaggctggaatcgtccgccaggctctcgaccgcgttggggctgcatcggcttgcccttcctcgccgctgctgtcttccctatcgacctggcgtttctcggccgccggccgtcttgctttgaccgctcccccttcgtcccctctcagtctccgtcacaacctccagtctgccgacgtcctccggccaaagcctcatccagtcccaaaaagacgctgccatttctctgaccgcgaccgcccgacggtatctgcatgcttccccgttcccctaccccacgtctctcgcgcggaacatgtcgcgttctggaagcatgcattgcgcacccaggcacgccagccactcccttcacatccaagaacgcctctttgaactatgtctgctggcgaccaagcgatcaacaacaatggggccaattgtccaggtgcaaacagaccgtcctttgcgccagtagggtgcgctccgtccgccgcctccatgaaacgagacgactaaggcactgcagcagatctatgacttgagggtcagccatgtcctacttgtctcatgtgtaggctcgacaaggtgaaggttgccagtcgtctgcagtcgcctcaagtcagaaaaggggtgtccgtgtcgggcgctgagggcgcgcagcacatatcgaacgcctccttcctttcctcggtcgtcagttcgcacgagaggtgttcacgaataagcggcggtagcgaggaaccagccgaaagcagtgagcccaaattctctttcggtggaggaaggccaagcacgcttgaaaaggcagaccccggctgtgttaatcggcactcttcttcaacctcccctcctcgccgtcttactgcaacatgccttgcgtaccgcgtctcttcgacttacttgccgccgcgtcgctctttcttagcgcgcgtcctcgaagcagccccgaccgcctgcggcgcggcttcgacgacctgtcctggagggttggaaggggccggctggactggtgcttggtgcggtggcggccaattcggtaaggcagttgtcctcaaggtcgtctcaagggacggcagactgacgagctgagcctgcctcagtcgctacaaccaaggacctcgcgacatcaacaaaaatgacgacagtagagcagtgtgccgcctattgcgctcctaccgaggcaacggtgtggtcgcatcagtcaatcccccttgtctcggttcatcaaccttacccgctcgcgacgattggcgtggaagatcatggccttccttgacgacaagtccgttgtcaggccccagacgtcttgcccagcgcagacagctgaccccccgccccctctcgcctgttcactagtgcatcgacaccgagaccgagctcgagtcatgcggcggctgccggcacggcatcttcacggccgacgacagctcagaggctctggctcggcctgtgcacgtccagcgccggcagcagggtcgcggcagcctctcacccgtcagccctccagcctcagtcggcatcgagtgagtccttcttcgtcagccgtcggtcagcctcagagagcatcggctgacgtccttggccggtcttcagctgctctgaccacaagcgtttcggccctggcttgacgtgccgcaaaggcgtctgcgccgagatgtagccccaacccatcgccgcctctcgtctgcatcctcccccccaccgcttgcttcaccttctccttccccttccgacctagtgcgtcgcttttcttgggctcttctgtcatgacttacatttccgtgctagctgcttccgaaatagggaaagagggaatgttccggccacttgctggcgctcgacgagggcgagcgactgaggccggcgagcacgagcacgaggtcgaccgatctgggcgggtttgagtgagaacggcgtcttgagcgaccaggctagggaacgggacgtcttctgatcggcgaggcgcaagaagatcagcgcctggaggaacggcgcgggtatcggacgaaccgcgcacgtaccatcttgctcttgacctcagcagcacacgtcagcagcggtcgctgagccgggtgagcatctaagctcagcgagcagaggcgtatcagctcccgcctgcccagaagactcctgcgagagagctttcaaggccgaatagcccgagcacgatggcccgggcgaaggtcggcctcgctatcagcggcttggctgaagagggggatcaagccggcagaagcggttgggggcggccgccgacgtgcgtccggccgcgagttcgagcagctagcgaactgaaacaaggccgcaggacaccagtgccggcggcgatgagatcgaggcggacatcttggaggctgtcagcgttcgagggcgaggaggaggaggacatggtcgaggttcggaggtcggggtccggaaccagccgcggacgacgcgcctgggatgatgacgttgcaggggtcgtcgcgacgggagcttcaagagggtcgaccctgctccctttcgccctcttcctcatcaaccatcatcccatccttcgccctactctagctagcatctagccatggacaccgtcaagaccaccgcccaccagtcggctgccctcgcacaggatgccgtcacgtcgtacggttcgtcgacgtccttcctcatccgcagcgacgctctcctgcctcgtcgtcgtccatctaccgccagcctcccatgctgacgccgctcacccgtctcttgcatcgtgccaggctggctctaccccgtctacggcatctcgtactttctctcgcactcgaagctccagaagccgctcctcaagatgatcgttccctcgctcgccatctcgggcgcgattgtcgtcggctgctttgccctgctctacctgccgacggcagccgtcctctcggtcgtccagctcggcccgctcggctttgttacggccgtctcggtcgtcttgtcgattgctggtgcgtcctgacctccgtctgctcgcagcgtgcgcggctgacgttcatcgtgcccctctgccgacccacaggcttcattatcagtcaggtcctcaagacgttcctcctctccgacaccctgaccgagacgttcgacgcggtcctcctcgagcgcgggctcgattcgctcgttgctaaaggccgcgaggtcccgcagcagtcggccggcagcaagggcggcaagtcgctcggcaagcttctgacaaagccgctcaacaagttcaagcccgaggcgatcatcaaatacctcatgacgattcctctcaacggtgcgctatccgtccttgcgctcttccgattgccagcctgtcgggtcactgacccgcgccccctctcgacctcgccctcagtcattcccatcgtcggcaccgttgtcttcttcgcgatcaacggcacccagcagggcccgaaccagatggcccgctaccacgagctcaagcagctctcgcccgagtcgcgcaagaagtttatcagcgcccaccggggcgcctactctgcgcttggcgtcgtctcgctcctccttactctcgtccccgtcgtcggacccgtcgtcttcacctacaccaacgaggtcggcgcagcgctgctggcggccgatctggaaaagcgagagggaaaaatcgtggagggggagcgcgccattaagggcggcgccaagaaggacctttaggcggtcgtcaggaaggaggagaagagggcggcaggcggccctcgacaaaacagactgtattttaccatgcattgtccttcgtaccctcgcgatgatcagcagttggcggatatcaactggagcaaactgcgggcacgagtaggcgtaacaccgcctgctgatcgaaatgaacgagagagcctcgcggcgatctccgacgcccatgcgaccgacctcctgtcgccatgctgctcgctacctcgatggccatcgctcgctttcctccctaaccatcaccacccttctcatcaagcatgtcgctcctccctccgccctaccaagacgagaagaacagcaagtccgccaacggcggcggccacactgtcggacgacggacgaccaaggcgctcaagcgcgtcctcgttggctcgctcgccgtcgtcggcggcctgcatatcgctggcctctcctcgggcaacaagggcgctgaggctggtgtgtctcgctcatcgttgctcagtcgagcgaggtgctcatctagcctgcctgcctggcccagtcgcacctcttgacgccagcatcctctcggccggcctcgcctactgcgacgcgctgtacgcccccaagccttgctttggccaccggctctccctcgccaacgagcgggccgacccagacgagccggcctacctcctccggaacgcgacgatctacacggccaatggcgaggtcatcgagggcggcgacatcctcattcaggatggtcttatcaagaaggtcgcacgcaagagtgggacgatcagcgtcggcaaggaggtcgaggtgattgatgtcggccgagcttgggtaactccgggcatcgtagacctccactcgcacagtcattctagctctcttgcgtgaagttcaaatgggacggctgactgacgtcgtccttgcgtctttgtccacagtggttggtcttcgtcgtcccttcgagcgacccctcccgctacgactgacgtccgcttctttcacccctgcagggcgtctacgccgccccaagcctctcgggcaacgccgacgggaactctatcaagtctccgatcctcccttacctgcgctcgattgacggcttcagcacggccgacctagcgtttgccaactcgatcgccggcggcatcacctcgatgcaggtcctcccgggctcggccaataatgtaggcggcgaggccttctttttcaagcccaggcacatcaagggcggctcgccgagcgacatggcccttgagccggcctttgtctttaacggcaatggcacgacgcgtgtcggaggtcggaaccggcgcagcaaacacgcccagggtgagaacatcatgcgggtccacagcagcacacggtacgtctctgtctgcgatgaggccgctcatcctcaattcccggcgtagaggctaacgagttacgcgacgctcatctcaggatggatcagggccactggttccgccaggcgtacgaggccggccgcaagcagatggtcaaggaggacgtctggtgcgctaagggcaaggacaagtacgtctttcacttttgctcctctcgctacacgagctttcagctgacctcattgagcttgcgcccgccagcaccgagcctttcccgatcgacctcgacaacgagatgctcgccgacacgattcgcggcaacgtcaaggtcaacgtgcactcgtaccaggtgcgccagtcgcgatttcgctttgtcatcgtcgctatcttgctgacctcgcctgctttctcgctcaagaccgtcgactttgacctcatggcccgcctgacgaacggttcgtctctcttacccgttctgctgcgggagggctctggcggctgaccgctctggccctttgcagagttcaagttccacgtctcggcgatccaccatgcacacgaggtccatctctcgctctgattatttgtctttgcgatcagtgctgacacgctgcgacactctccccctcaggcctacctcgtccccgacctgctcaagaagtactatggcggcgcgcctgccgtcgcagggtttgctgtgacggcgcgctacaagtgggagagcatgcgcggatccgagtttgcttcgtcgatcttggccgaggctggcagtgagtacgcgactggcgtcagctggcggctggatggcagctgactgacgctcatcttgtctgccgtagtcaccaacatcatgaagagcgatcaccctgtccttgactcgtacgccctggactcgcccttccctctacagttgatcctttgactgacctgagccttttccctgcagccgctacctcatgtgggaggcagcgcaggcccaccactacggcctcaactggacgctcgcgatggacgccgtcttctcggcgcccgctcggacggccggcctcgaccaccgcatcggctttgccgtcgagggccacgacgccgacctcgtcatttgggactcgatgcctctttcgctcggcgcgacgccggcgcaggtattcatcgacggcgtcaagcagctcaagcacccgcacgtcgtcgccaagcccggtcggcaggatgtcccccgctcgcggcccgactcgcaccagcgtgccaaggagacgcgcgagactggtggcaacctgtcgtatgccccgcgtaagacgctccaggacgtcgtcttcatcaacgtccgatcggcctttggcatcgcccacgacggcgaggtcgagcagacgttcggcgcctcgtacgaatcggctgactgggccaatgtcgccgccccgctcggttcggttgtcgtccgcggctccgaaattgtctgcagcggcgcttgcgactcgttcgcgaagggcatcgccgacgtcgtcgatcttgccggaggttcggtgcttcctggccttgttggctacgggccggctctcggcgtcagcgagatcgcgcccgagaagtcgaccgtcgacggcaacgtcttcgaccttatcgccccggccgtcggcgtcccggacatccttaagggcaccatcatcaagggctcggaggctctcagcctcggaggcaaggagctccagtgcgctgatcgacgtgtctcaagctgcacatggcctgcgctgaatcttttgcgctcgcttcaggatcattcatcacgccggcattctcactgctttcgctcaccccaccggcaacggtctcgtctccggcctctcttcggcgttccggacgggcgccgagaacgtcctatcctccggcgccatcgtcgctgaggtcggcgctcttcactcggccctcgcccacggtgccgcggccggttcaatttctgagcagatccgggcgctcaagctgctcctgcttggcggcgcggtcaaggactctgaggcggccagctactttgcgaaggtcgcgaagggcgaggttccgctcgtcgtcgccgctaacaaggttcgtctgctcttcatcgcaccctcccttactgctcctgatcactgacacccctcttatccgtaggccgaccacatcgcaggcctgatcaacatgaagcgcgccgtcgacaaggcgtctggctcgaagctcaagctcgtcatcgagggcggtctcgaagcccacctggtgcgtcgctggcccctttagcccttctctcgaacgggcattgacccgctcttttgcctcgcagctggtcgacgagcttgcgaaggaggagatctctgtcatcgtcccgcctagatcgtaccccggaacttgggatactcaacggatcatcgccggcccgccgctcaccgagcacacgctcgcctcgctccttacgtccaagggcgtcatcgtcggcatcgggcatggtaccaacgacgtcgtccgtcaagcgcggttcgacgccttgtggaactactctgctgtgccgtcggtcttcagcccggcctcggccattgcgcttgtctcggccaacctttacaagatgctcggcgtcaaggccaaggccggcctcggcggcttcatcgccgtcgagggcgacgtgctcaacatgggatcgcgcgtcgtcgctgcgctcgacaacgggcacatcgagctcttttaattaactcgcgtgtcaagtgacgcgtcgactccgccagtgcgagctatcaatgacgacttgcacatgtttcgcagctgaacagacgctcagacgggagtcgtcaaaggtcgttagatcgtcaagcagttgtgtccatgtgctggctgcttcctctacagcgcaccaagggggtcgcccccgttgagcggtccagccggcccatttggtcgcttcgagctactgacgctccgccaatgctcagatcgcgccatgctcggcgcaccggcgagaggatcgccattcgtccacggaggtggcggcggtagcggtggcggcgccggcgggtacgagcccgacgaccgagccgcgtcttcgcccgcacgcgcccagggaggcggcttggctgcaattggggtcgtcgacgaaggacgggtggccggcttctgggccgcttgggcgagacgagcggccaggctctgtggttgtgcggtaggagggctgccagccaggccgaccggaaggcgcgagggcggtgccggcactttgaggatcggtgtcgccagcggcgaatacgacggaaacccctgtgaaggaggggccttccttagacatccgcctgcgctttgctcctccctcccactcggagttgccgaaacttccgtcttgcccgctcccctcccagcttcgcatgccccgacccctccttttatcgcgctatccccctgccgcttgtactttttagctcgcagccgttcaaaaaaaaggcgatgccatgccgctcgtccctgacaagactctaagcgtctgaaggtcaagaggtagccatcgcagacggtcaaggcgtgcagggggtcgtgagtggtcggtgcgtcggaagcaaggtggtggatgcgaagggagaagccgtcagtcgtgaaggagaaaagtggcagaaagaggcctaggccgaggggatgagatgctcggcgacgtcgacgaacgcggcaaggcctagattggctgcgcccatctgctcatggacggcaagcgtgtgcttgaggacggcctcaagcgccggctcccggtcgtagttctcggcgtctgctcgacaaggcgggcgcgagcttgcgatcagctgagtctgctcggatgcggaggcgagggacgctgtgactgaccaaagatgcgaagctcgatctgatcggccagctgggccagcccttcagcagtgacgagcttcagagcgaattcgcacttctcgtcaagctcgccagtcaagggcatcttcggcaggtccgcgaaggcaaggaggccgatgcagtcgttgagcagctcctgccacccgttggtcgagactgaagagccggacgacgcgctcatccgggcgagtgaggcgagcgaccgcgcgtaagcgagaatccggtcggtcgcgtcctctgcgaccggctccaacgcggcagacaatgaaggaagagcggcggcgagctggacgggcggcgacatcgagggcgacgagttgggatgagccgaggatcggaaagccttgccaggaggcaagcccgttccgtctccggtcgagtctgcgctgccggaagccttgcgcttcttgctgtttgcggctggctcggcttggccgtcaaaagtcgagctggcgcgcggagggctagaaactgatcctggcgtcgcggtcgaggcatcgacaatgaggcggacgagctttgtgcatcgcagggtaaagccagccgtgctggcgaggacggccgggtagcgcttctcgagcaagccgatggccgagtcgagccggccgcgaataatcatgtggcggaactggcggtcgagcaccgtggtgcgcgcgccgggctcgattgtggggacaacatcaaccgacgtggcaggaagagagttacggttgaaggccgcgagcgtggccgaaaaaccctggtggcagagatagccgccgacgagcacgcgaatcgcgttcgacccttggacaccagctgcagcgtcctgggtcgtcgtgggcttggcggagccctttttggccttggcctccgatgtcttgcccggggcaactttgctgcgagccgccttgccggctgccttgccatttgctgggctggcgacggcagtcggaggaccgggggcagtcaatccagccgccgaggtcggatccgaccctgtggttggttccgtcttgtcgaagagttcccagaccgcccgctggagaccgctcaaacggttccggtcggcacgaccgtcctcggccgccgcgcgctcgacgcgcagctcggtttgcagctgcacaagacgtgcctgatcagcgtccgagagatgactggccgaccgggccggccggacgggcgtggcaagaaccgagccgagaaccgccgtctggcggtcggcaaagtagccgtcgatgtcgaatcggaacggaaattggccaaagttggcgcggacttcctcgcgtggcgtacgcaggccgattgtcgggtacctggatggtcatgggggtctcgatcagccagcgaagcagcgatattttgcgggttcgacgtcatgcaagccagggacgcacagtccctcgcagttgaggccctggaagacgtgcccgagcagaacaccgttctgatcgagaggatcaaagggtcagatcgcggtcggccgacgtttcgccagcacggcggcaaagcagaccatgctgacctttgtgtagaagacggcgccctggccgacatcgagcccgcagccaatgacgtctgtcggatgattaggcgtcagtgctcacagtcagggcatttaagtagggcgcgatgcttaccgccggtggtaaagcctggcccaaactcgcggccctggcccttctcgccaaagaccatgccgtcatcgccgtggtagccccagctgaagcgctcccagccaggcagccggccgaggttgacggcccgaccgctgaggccgacgccgatgtagcctcgctggcccgcatcgacaatctcgacctcaaagtagaagaggccgaccgaggttgggatcgggaggttggcccggaccgaggctgcatcgcgatcgttgcgcgaccggaggggtacgtacgacgcccggaagcccgaggttgagacggcgagcagaggcgagtggtcagtcggcgaaaagtgggtcggcaggtcggcatcggccggctggacgtcgtgaaggtgcgggtgccgccgcaggtacgtcctggagcaggcgggagagcaggtcaggcaaaggctcctcttcacgagaacaggcggaagtacgaacgggagaccgtccgggagatccttcccttctgccgtcttgcccttgccggcgacccagacggctgcgggcgtcgcctgccgctccttgcgatcctggagccggcgcatctctgcccgctgctcgagctggcctctcggggccgcggcggcgctcgaccggcctagggaggcgcccgagccgctcgggcgagcgacgtgcagcgggtggtcgtcgtcgtgaatcgaaggcacgctccagacggcttccatccaggcttcgccgttcgcaccggcgctggactggcccggctgccggcgtagagcaccaccagatcgccgcagctggttggacgtgtatgctaactgctgctgctgctgctgcgccgagccatcttgccaaagcgggtcggcgtgccagttgatgtcgagctcgtcctcgtcatcgtcgtcgtcggacgcgtccgagccctcgtcctcgtcagacggcccatcaccgccaaaggagtcgccgccgaggatcgcgtcaatgtccatcggcgagcccgagtcgacggcgagcggcagggcgaggtcgccgtggtcaatcacgcggccccaacggcgagtatcaggcgagagctggacggctcggcggagggtccgcgggaaggcgtcggaagaggatccggcctcggcgttaccggagttggaaccctcgttcctcgtcccggccatgactgtcgtaggaagggaggcggcggccgtcgcctccgtcgacagcggcgacaggcgcgagaggagtgggtgcgagagccgcatcgcccgctctgctggcgagcctgcgccgccacctggccggtgtggctcgggcgcgccatgcggcagggcctggacgaggcccatctgccagtcgttactgaggtcgtcgcctccgccgctcaggggtgcccctgccgcggtcgaagcgcccgtgaggggcgcacccggatggcgtgcacgcatgagcaggcgggagcggagcgcctccaactcgctggcgacatgacgagggcgcgaatcctcttctgcttgcccagcaaggtggctcgagttggcgttgttcgaaggcatgtcggctgaggtcgaggtggaggcggcgcctgctgcggtgccggcgctgggaccgccgctgccgctaggagtcgccgcgatggggtccgccaaaggcgaaccactctggccgtttctgagagaagacccaagaggtgcgaacggggtcagtcgttggccctcgtcattcaggcggatcgagcgacgcaccggccggggtcggacatccggggcggagggaggcgcgggggtggaggagctcgtctggccgagggtttggcctcaaagacgctcggtcgggcaagaaggtagattcaagcctgtggctggcttggttttgcgatgagaggtcctgctgcttgcttcagggtgtgagcgatgggaggacgaccgttctagaggcccaggggggtgcgtgacggcttcgaggcggggcgatgcgcaagccgggttcgatacatttcagagtcgcgccgtttcggcgacgcgccgcgctgttgtgtttcaagttcgagccgacgccccgctgcttcgctcaacctcaacccactctctgcgccttcttctctcctcaagctcgctccaacctcggtacgggcgcgccctacttcgcccatgcagtttggcgacacagaggcgcaggtcgagctcgatcgcctcaagcgccagctcattgccaaaggtccgtctgttgtctccgacgcgcaggctcgggccgggctgaagctgacctctgtgctcccaactctcgccgacagatgcccagatcagctcgaccgacaacgagctcttcaagctgcgcaaagactacgacgatgtcaagcgcgccaaggccgacgcggtttacgacgtacgtaacagttctgcgttctgtccagcaacctcgcgacagccgccagcagggccgactcccgcgcttcatggatcgacctggctgaccacgtcttgcaatcccagctcggtctcgaagccgcgaagctcaagaagacggacgagcttctgacggcggcacaggctgtgtgtaaacattccgcctgctgagcatccttccggccagctcgaacgcgctgaccgcgtcacgctgccccgcctcgcaggagatcaaatcgtaccgtttccgtttggccaacgccgacgccgctctcgtggccgctcagagggaagccgccgagaacctgcgttccgctcagcgcgacacgaaccggtccgaagagtctggcctcgctggcgcacacgcgctcgagcaggcccaggccggccaggccaaattcgccgaccgcgtcaaggcactcgagcgggagctcgccgagacaaagtctgcaagggcagcttctcagccgcagcagtcgcaacttccggtccgatcgggtctgccagtcgctcagtcccgcctgccgatgaagggcggccgccgacgctcgtcctcgacctcgaccttctccaactcgtcattccaaccgccctcagggccagcctcgtcaggaggagcttcggcggccgaggtagacagtcttaagcagaagcttgcaaaggcgtcgcgcgacctcctgctcgcccagaactcgcagatcgcggccgagcgccagctcaagcgcgagcgcgaggaggcggctgacaagctcgacgacgtacgggaggaacttgagcgggccggctgggagcgcaaatcgcttgaggagacgcttcggtcgacgacggcaggaggggctggaccagggacgaacgcgtttggcccggtcgagcgcggcaagctcgtcggccaggtcggcgtgctcgagggacgactggcggcgatccaggctacagttgacgcgaaagacgaggagctcaagcgtgcgtccctctctgtctactgcgtttccttgcccttgactaacctgaccggtctcttgcgatgttctcagacttgactgccacctcgtctacagaaattgcctcactcaccgccagcgtctcgacacttacctatgacctcgtcaccgcccgcgctcaggccgacaccctcgtcagcgagctcgcggccatgtctcagacggcaaagactgctaaagccgacctcgatgccgcctgccaggccgcagacgaccaggccgcgcgggcaaacgcgctgcaagaggccatgatcaaggccgacgccgtcgctgccgaagctgaagaggcaaagcggaaactccagagtcgagttgttgctctcgaggccgacctcgctgccgctggcgacttgggggagctcaaaaatgacctcgaagccgacctggcgtcggtccagacggcgctcgttgcgtccgaggcctcattcgcagccgctcgttcttcggccgccgacctccaagaccagctcgacgtctcgcaggcagcgtgcatggacgccgaagccgagatctcacggctcgagatggtcgaccgcgaacgctcggcgagcgcgagcgagacggcggccgaccgacaggcggcgctcgaccaagtcgagctcgaacgcgatgcgctgcgatcagaacttgacggactgcgggctgagctccgctcggccgaacagggccatcggcggaccctcgaggctgagcgcgagagcgaggccgagacggcgacgctcctggccgaggcaactggcaagctcgcggcgagtgagaaggctgtcgtcaaactgtcggccaagctcgccctcaaggaggaggagacgaaggagcttgcccgtgcgctgatggagatgcctgcagcagccgatccggcaccgttgcccgctccagtggccgtcgacaataccgcacgctctttgccggacgacggtagcctccgcctgaccgaggaggaggccgagggcgttaagcgcatggagaacgccatttcgcgtcttcgcggcgagcgtgacggcctgcgtgccgagcgagaggaactgcaacggtctatccggttctcggtccgtcttgttccatggagctggccatctcctgcgaccgctgctgacttttctaccgtgttgctcaacaggaggccgagactgttgcggctcaggagcacgtcgcctctcttgcgcgagccctcgcggacgagcagcaggagcatgcggccctccagatgatctcctccgacacgctcaccctcgccgagtcgctccaggagcagctcgatgtcgctcggccggcggtcgccgagcttgaggcgcttcgtgacgagctgttccgctcgctcgaggcctcggacgcccagctcggcgaggtcagacgcgctgagcaggaggcggtcgcactcggcaactcgctcaaggtccagctggccgagctcatgacgcgaaccgagacagtcgagggggcgcttgctgctgcggttgaggccaaggcggccacggtcaagcaggccgccgaccaggaggccgctctcgccctcgcttcagaggagaaggctgccgctgaggtagaggctgtcaagtcggcctcgattctcgtcgccgtcaccaaggagaaggatctggccatgtcagccctggccgagaagcacgcagcgctcgaagccgctctcaaggccaccaccgctgctgccgctgccgagccctctgttcgaggggctgcagagcgtgcccttcccgacgcaacagcgccggcgccctctccgcccgctgccgcagttgagtcgatcatcaaggagaaggaggcccttgaggccagagtccagcgtcggaacgcgagtgtcgagacgctgcagcacgacctcgcgaagcttaacacttcccacgcagtgagtcgcaacgagcagatgagcgtgctctgaccgactctcaaactgacgcaatctgcactcgcccgtctcttcagcttctcaaggatggcttcgacgatctagaggaagagctggccgacctcaaggctgagaagacgactctcaccgagcaagtctctcagcaccagtctgtccaggcagcgctggcggccgacctcgagagcgcccgctcgtccatccagcggctcgagacggccgtcttagttgcctcgacggccgcgcccgcttcgtacgatgacgagcaggtcgccgctcttgtcggcgttctctttgccgagcgagcccaacggatcgatctgtccatcaagagcgtcgcttccgaccagatgtctggcgtggaggccctcttggctatgaccgccgcccgtctcgaggctacagccgaggaactctcgagtgcccgcgagcagtcgctcgccctcgaggctcagctggccagcgagaaccggcagctgcacgctcttctcaacgcggcgacggcacgcctcgaatcggtcgaggctgagctttctctcgcggctggtcgtccgtcagtcgagacggcgtcgctcacgcgtgccaacgagatcatgtccagccggctcgactccacgacggccaacctcaacgctcgtgcgatggaggttctggtcgcccgctcgtccatgcgcacccttcttgcagacctcgaggccagcaacgctggcctcgagtctctcgagggcgaggcggtcaccctgcgctcgcgggaggccgaccaccttgccgcactggagagcagccaggtcgagctgcaatcggtctcggaccatctcaaggacgctcaggcggcccaatcgcaactcgcggcggacaatgtggcgctccaagttcagctcgaggctgctcaggccgacctcaacgtcaaggtggcagcagtctccgaagcggccgtcgaccgcgagactggcgacgaggccggcgctgctatcgtcgccgaccttgaggccgaggtgtcccgcctcacgactctcgtcgccgagcactcggctgctctcgccgacaaagagtctgcggttatccgcgcggtcgagaacgccactctgcactcgcagaacctcgccaccgcgtctgacgccaagttcgcccttgaggagcaagtctcgtctctgcagctcgagctgagcgagatgcgctccgcaagggatcggttggttatcgaccagacggccttcaaaatcgaaatcgcgacactgaaggccagctcaattccggaagcttcgaccgacgaggctgaccacatcgcaacggccggggctcgggtggaagcgtccgaggccaagcacaccgccgctcttgccctccttcaggaggccgaggaggcaatcgcgtctctccagtcgcagctcgctgcgtccgaggatgctctcgctgggctgcgcgcggcaccgaccgaagcaaccgtctcggacgtctcggccgcgctggtcgagtcggaggcagcccaccggtcgctcatcgcctcacacgaggagaccgtcgccgctctcgccgccgctcagcagtctgaggctgcgctccaggaggaggccgcctcgcggcgcgcccagctagacgacgtactcgacggcctgtccaaacttcagcaagaccacgcctccatcctccaggccaagtccatcgccgaaagccacgtctcccagatcgtcgtctcgaaggaggaggccgtccggcagctcaacgaggaccacgccaaggctctagcgcttctcgagcgggccagggccgtcaagaccgagcaggcgcaagacctcgaaatcgagctcacggcggccaagaagtcgctacaggaggccatcgcccggagtgaggcccaagacgtccagctcgagcaacaaggcgaggccctcgaccagctccgccgcgaaaactcgacggccaagagtaccatcgaagccagcgccgccagtctcgcaacggctgaggaggctatccgccggatggaggccgagaaagctgccgctgccgccgagctcgagaggatccatcagaacctgatggagcagacgtcggtcgtccaggaccggtacgttgagaaccctcttgctcggtgacgtgagtatcacgactgacttgacttctgccccgtcgacctcacagggagcgtttgcatgccgagacgatgcagacgattgaccggcttcaggcgcacatcgctaccatcgagactaagctcgaggctgccgagctccggctcggtcgccagaagtcgcgccacgacgacgaggtcgcggcccttgagaagtctctcgccgaggcttccgcagcgtcgggctcaccgaccgagggcagcgtcgagcagcggatcgtcgacctcgaggaccacgtcgagcgcttgatcgcctcgctcgatcagaagaacgtcgaggtcgaagagtacgtcttctcgtacctcgatggccgtcgttcggaaactgatttctttttttcttcgctcgacagggccgacgacaagatcatcagcatgcttaaggagaagaagaagtttgagcgcaagattgagctgctccagaagaagctcgacaaggcaacggcggccgccccgccggccgtcagccatgtcgtctcggcgcccgcacctgccgcgcccatcgctctcgcacctcggtcgccgctgaacccctcgcccgccgccttcgtctcggcctcgcctgcgcgaccgatgacggccgccgcacccgcccctgcttcgatgccggcagcgacgcccaaagccttcaacatgtttgcgccttcgccggcccgcccctcgcaccggccctcgccgtccgtcccgtcgtctgtcggcggcgccgtcagcaacggcttcactccgctgtcgcatcgaccgatcgcttcctcccggcgcgtctcggccgagcatgccagctctggaccgggaacgccgcgctcgcgggttgcttcggccccagctgtggcctcccctcggcagcacgccatcttcacgtcgaacaccttcggcaacgagaatgtcccgcccgtgacccaaacgccgacctcttcgattggcaccaagcgctcgcggccggccgaactcgagcagctcggcccgtccgccgtgacggccatcctcgcgccggccccgtcgcccggctcgatcctctcgcccgcatcgggcaacacgccccgtcgtgccgtagcccaaccacttctgacgcgcaagacagacctcaggggcttcacgcccaagcggtcggttgaccggcgggccgagctcgcggcgggcgtccagagccgactcggaggcctgactctcggcaaggagggcatccaacagtcaacgggcggacttaaagcgagctctggcgacctcatgagcaggctcgctgccatgaggcgttgagacgctcgcccccttaccacacctcctctaatcaaacccgatcctctccttctccgctctcacattgacgacccttacgaagcgtcacgatccatgtcttcttccgtcttgccccggtgatgaccgcaaacggcatggcatttgagtctgacggcgtcacttgtgccgagcgggtacacggtgggcgctgatcccgaaagcgtccgatgtcgactcgccttgagggccggccgcgactcaacgccctgggatgctgatcgcagatctcgcggccacgtgtgcacagagcagcttcgaacggcgagtgcttgtgcgagacgattacggctcggtcgagaccgtgcagacgtgctcgttggttcgagctgcgagagacagctctgggccagatggccagcctgctccagagttgtcggcttacctgaccgattaatctgccgcgaagtggagcgacaggctatctcgcaccgatccggaaggcctcctcccagcccttcacctcgaccgccatgcactcctcccactccctcctgccgaggcctatcctcccggcctctgctccctcgccggctccagcctcgcctccaccgccagcgagcaagccgaaccgccacgactcttcgaacgcgccttcgcggagccaggcctcgagcgcgagtttgccggcgtcaaacgcgcaggctgggtcaaggagcgtctgcgagaggcggacgagaaggctgtgcgagtggtggacggccgcgatgagtggcgagagggaggtgcctgcgaggaaggagaggtgcacggatgagttcaggatcgaatccaactcgagcaagcgtcgaaagcgccctcactgaagtgctcgagcgaccaagtcgtccagagcggcgttcgcgcggtgaactcgacgcctcgcgaacgcacgctctcgaggacgagcgcctcggctgcgcctgcgagcgtcgcgagcttcgtcaggcgtttgtcctgacgagacgaagcgcggtatagggcgtcaactttgttcggagatggaggatcggccggcggtactcacaagcttggttaaggcggcgcgcaggtcatcggcggcctggcatagtcgagcgagccaatcggacggcagtagcgagggcgcgtgtgggtaggtgttggcccgctgggcgatagccatgttgctgtgatgaaccagagcagagggatcagtcagagcccacgcctcgacaacggggcgacggacgcactcgagctcggtccgggcgtcgacgagcgccttgccggcctttcctccgtctagccggacgaccgcctcccagtccctcagcgtccgctcgacctcgacgagcacggctcggcatttgcgatgctgcggactcgggtcgatgctcgctggttgcatgggcgtctttgccggcggcgagtgcggagtcgcggacgacgaggacgagaggagggaggacgctgggaaggccgacgcctgctgggcggcggtgagaggcgccgagcggcccgaggacgagggcgacgacggcgccgagggtccgcggagggacgacaggcgcgacatggctagagcgtacggagctgcaggaggttcagagtcgaggtcaggtcgactggcaggcagaggcaaggggaagcgtcggctggacctcgactgagcctggcgtcggcctgatcctggcgctgggggctctcaccgcggaaacctcgaagtcaacctcaggccagcaggcagcagcccgtcgccccttgaaccgcatccaccctctgcctcctctcgacagcagcctcctcagcatgcccaagcagcgcagcgtcaagtcctctgcggcagccggcccgtcgtcggcttccactagcaagccctccaagtcggccggcccgctccagctcggctcgttcaccgtcctgcctctcctcctcgctcagccttcgacgagcagcggcagcagcagcgccaaggacacggcccggcactatctttacgttcggccagacgtgacggctgtcagctcgtcgggcatggaggccgagacgaccgatgagcgccggacgctcttcgtcgccaaccttccggtcgacgccgacgaggacaaggtccgcgccgtctttggcggcgtcggcgcgatcgaggatgtcgtctttggcggctcggccgggtcgggcaagggcaaggagctctttgcgctcgacgatgacgttgtagacgaggacggcatggacgacgagtcattggacgaggaggaggaagaggacgagagtggcgcgctcgagctcccgtcgaaccggcctcggccgccgaaaccagctaagacgagcaagcgccaggccaaggcggtgacggtgacgccgctgtttgccgactcgctcccgacgctcctcccctcgggcagctcgaccgccaaagtcacgttcctctctgcgctctcgctcgcgcgcgcgctcgccctccccgcccggccttggccgctctcgtcgccggccggcctcgcccacttcctccgcaagcacgaggcgctccgcccgccgctggcgctcgtcaaggcgcacgccgactcgtcaatcgcagcctttgagcggctccaggccgaggagcgccggcgggtgaccgacaagacggcgatggtcgacgacgacggcttcacgctcgtcgtccgtggcggcaagtacggcaaggacgcggctggcggaggtgtcggcgtcgcttcgaaacggtgggagagcgagtgggccgcggccgagaaatccggcggcgtcaacccgaagaagaagagtaaggagctcaaggacttctaccggtgcgtccgacggccgtttctcactttgctgctctctgctgctgcatctgctgactccctatctcgcttcccccgctcggtcttcaggtggcaggtccgcgaggccaagcgcgaggacctcgcctcgatgcgtgccaagttcgccgacgatcagaagaaggtcgagaagctgcgctccaaccggcgttttatgccctactagcgatgaaacctggctgcttgacgacgggacgtttgtggagcaagctcaggggcagaaagagaagctcaactgcgacgtctgggtcgctacagcccctcgctgattgagcgctgaccacaaacagaggtcgctgtccgcatgcctacctctttccgcattgttctcgaccgcgagcgcttcctccgcgtgccctgcttagagcgacgccgatcgtcgacgagtgcgcaatgcgagagcagtaaatgcacactgcgtacaccccgtacgcatgccgcgcagcgccggtggggaacgcatcggctcctcgagctgttcgagctcgctttgccaccttgcctgtcgactcccatcacttcaagctcgttaccctcgcttcgagactactcgcagaccatgggtacgtgcctcagtcatcgccccgcgtcgaccatcgtccgagggaggagctgtgctgatctcctgcaatgtccttccctttccccctgactcccctgactccgatccctccctcccctttccgccccttctccctccagcccgcaccaagcagaccgcacgcaagtcgaccggcggcaaggcgccgcgcaagcagctcgcgaccaaggctgcgcgcaagatggcccctccgaccggcggtgtcaagaaggtctgtgcgcggtcgttttgtctgcggagtacgggctgcgctccccagcggcagcgtcgccgcaacaaggcctcgaacagtgactgaagcatcttctcctcgccttcgtcacagccccaccggtaccgccccggcaccgtcgccctccgtgagattcggcggtaccagaagtcgaccgagctcctcattcgcaagctacccttccagcggctcgtccgtgagatcgcccaggacttcaagacggacctccgctttcagtcgtcgtgcaggtcctgtcttcgtcgtcgccgtcgtcatccgctcgcccttctcagacattgacgctcactctcatcttgctggcctgcccccagtgcgatcggcgccttgcaggaggcctccgaggcctacctcgtccagctcttcgaagacaccaatctcgccgcgatccacgccaagcgggtgacgatccagccgaaggacatgcagctcgcccggcggctccggggcgagaggcactgagcaggtctctcccggcctttaggtcgcctggctgtcgcgcaccgacccccttttgattttgtatcccccttcaatcctcgctgccggccttggcgcgagagtcttttcgcctctgctaatctgcatacgtcttctcccgaggttgcaagagtcgattagaacagctgctgccagttttgaccttaggtcgaccggcgagttacgcagcagacgaggctcttgcgtacgcgacgttgtaggggtgcacgggcccgaagcgagcaaggcgctcctgacagtactgctctggagcttgaaggggtataagtgatcatcgtctgcagcctcggcccccgctggcccttcacccgacgagctgcctctcagagcggcgtgatgactgaggtctgcttggcatccgacagctgcagtaggtttcgaaagcagcgtcagcattgccaacctcagagcacgagatgaaggtttgtcgacgtactgtccgtaacgagtagtcgtctccctgctgcgtgatgtagcggacccagggcagggcctggtagccgctcttctcgacaatcttgaggtatcggacctggatgcccgagacggtaaagtagggaatctcaaacttgaccgagatcgggatccggaccggtgcctcctctgtagcgccgacaagtcgagatggcgtcagcgggcgaggcatcagacgaacggccgggacggccacgcacccgtcttgaccgacggcaggccaaagtgcgcgcgcatcagatagtccttgccgcccgcaagctgcttgatcttccagacgaagcacgccttctcaggcgcgtagtggacgctgccggttgccgcctgctcgggtcgaaagtgtcagcgggacctcgacgcagggagagtcgcaagtgacgacgcaccctgaacttgggcgagtcggcgtcgtccggtacagggacgtggatctcgacattgttggccgtgcttcgccgcttgaactgcgcccgaaccttgacaatgtactcgaccctcgagccccgatggttctcgaccgccgctacagggagagcacgcagcggtcggtcagcgagcgttcgcccgagcttccatcgcacgcagagactcgccctcgacccaaacgagcggcttgaccggcgtgctcagccggtagctcatgagctcaaattcgccgtccggcgggatgaacgagatcgtccggtcgttctcgaaccgcgccagccgcacgcactggtggaacttgacgtcctccatctcgatcgacttgcctcggctcgctaaggatcggataagagtggcggtcagcgcggagatgcagttgaaaggagtgcaggggctgggcgtactgcgaccggtgctttcgaacataaccttgtcgttgagcccgagccgtagctcgggcatgcccgacaggtagcacttcatcttgacgctgccaaggatctccgagcgtatgacatcgccgttggcgttgaccttgcaggtcgaaggagcgaagctcggtcaggttgagccggtgcagagcaatgacgacagaccccgcaccagtaggttgacgctctcaatcacgtcgaggaagacctcgttcttgcgataccggatgccttcggaccgccacgagacagcgttggtgacggccattggtggccgtacttggacctcgagcttgtgcgactcctgggtgatgtacctgggcgcagggcgcagggcgagagcacaaaggtggaggtcagcgagacgccttggcagggatggtcggccctcaagatgtggtacgcactcctggaggatcttgctctcagtcgtctgcgggaagccgaagtccatcatctcgtcgaggagttcatagacgatgacaaagttgtcgcggatcgactcctcctcgagctccttgaagtactcggtcaggactgacgctagccggtggaggaatatgatgatctcggccgcgttcgtgttgcgctttgacagagcgaggactggaacgatgtgcagagcgagcggatcgaaggtggtcagccgtcgcgtctactggcaggcgggcggggggcgcgtctccatcccgagcgcctgctgccgcgtgtgccggccagagcagttctcatcttgaacagttggccctcccggatcggctgctcggcagcagcctacgctcaaacagccaaaatcatgccgacgcactgtagaggttggagatgcggatgtgcatgaagttgatgccctcgctcgtgaaacagggcgtgaccgagacgttctcctcctccatgtcgagaatgagcggaaggaaacgctcgatctgcgtgggcgagacgtcatccctgtacgagcgctgtatgagcgactggaggcggcagcacagacgagcaaaggaaggagcgtcagcaaagctcgagaccagtcgagcgtcacggcagcgcggcctgctgcaggcgtcgtgccggcgggcacgactggactcactttgcccttaaggtcgagaatggccactgtgagggtaggagtagcagctcaggtcagcctaaccgtagcgtgcgaagagattcttcctccttccttccccttgcccgcctcgccgacgtcctggagggagcgaaggatgacctgacgaagagccggtcctgcgaggggcttgcgatggagaggaggcgatcaacgcacccagagaagccatggtctcgacgagtcgcgccttccggctagtttctggctgggctggcgagggagctgcgactcgggcgtctggagtagaagcaggagctagacgaggggctttaggctggggcgaggcggaggatgaggatgctgtcagagggctaaggcgaccgtcgctcgtccgcccgagctcaccaacggcgcgacgcggcgacccctcctcgacctcctcctcccaagactcgcctggctctcgtcggccctctcacacagctcgctgggcagcacgcacacgtcgcagtcaccctctcgctccaggcgcgcgatgcctggccattcgaacgatgtcgggtctggcgcaggaggtctgtcggcgccgtcaccgccgccgccgccgccgccgtcgcgaccaggagcagtacaggcacgagctcagtctggcagcccgaccctagccgccgcaccccaggcccagcccgggcagctcgacatgatctcggatccatcgcgcctgctcgcactctacccgattggcggtccttatgtcccgtccgcatcaggtgaggccgtatgcctggttgaccctttgtcctcgcgacgcggccgcggagccggacctgaccgtaccttccttctcttcgtagtcgcgcaccacctcgcgccgctcgtcgactcgccgctcgacatccgccaactcgttccgggctggcatcgggcggccgactttgcagagcagctccgcgtgctcgaaagtgggaccagtccgaccgaacttgagcgagcgtggctccagcggcagctcgaggccgtcggcgccgtctgcggacgaggcgcagcgccgtacgtcgccctctcctatgctctgcccgccctctccgctgacgctgacaactgctccttatgcactggcggtagaccttcgatctccgatacgactccggtgtcatttggtcatcgcctcgtctcccttctgccgtcgacgcctgcacatgcgccgccagccccatcccgcgtggacccctccgagtcctcagctttcttcgcctccttcatcgccgacactctcgccactatggcagcagctcccgttgtcccttctcagtcctcggcgcggtcctgtgccagcccgactagcagccaggggagcctgacgccgacaaaggcgacggcgccgagtgccatgcggcgcggctcgagcgtctcgtttccaagccggcacagctccccatccgaccagccaatcgcgagcacatcgagggtgaacggtgtgtcctatcagccgagcccgctcggctcgaggtcgtcaccggtccgtggtggcgcatatgagcaccctccgagctcgtcgcccatcgtctcgcacgccggccgcctgcgcccaaccgccggcccgctgcccccacaacccgcctacggctctgtgcaggctagcatcggcaagatcaagctgaagcggccgcactcggctccgcccaacggtgacccaggcagcagcccttcgaagcgagtcaaggaggaggatggccaggcgacgccgacggccgtcgttaagggaaaggggcgcgagctgaacggccgtgcgaacgagcacatcaaggttcgcacaggaggaaaaacgcccatcggtgagttgacccgctattgctcctggtcgaggggtgtatgcgccggttccaagtctgcgcgcgttcaactcggcgagctgacccttcgctgacgcctggattgtgtgacagactcgcagcacaagctcgtcgactacatccaagacattctcgaggcactcgacacgctgccagcatccctgtcagcgtctcacccgttcttcgcgcgtctcgcctggggaccggctggccagccgtgcctcaagtcggacgcgcttcggcgactcgactcgctcctcactggcgtgcgcatgtggccggcagcgctcgtggaatccgacggcgaccagctcgtgagcttgctccgtgctggcgctgagaacgaggacgacgaggaggtcgtagacgagaagctcgacgtgacgagccctttcaaggggagcccgcgtaagaaggccgccgacgagatggaggtcgaggaaaccctcgtcgtctcgtcgggcttctcgtcgccttcgtacggcgggtttgacagcacgccgcctcggcctccgccgaaggaggccatcgcgacctcgagtaagggcaaggagcgcgcgcgccgaccagaaccggtcgagcgcgagctcgagcgcggactcggagctggcatcctctggaaactgatggcgttgccaggggtgccgaagctggtgcgtctgcggctccaaccctccgaccgtcgccttccgcacgacgctgacgatcaggaacccccatctgccagcacttctccgaggagctcatctccaccctcacatcccgcctcgccaaattgcttaagacgagcatcttcccggcactacaactttcagccgccccacccaatctgccggcgctggcccggtcggcgagcttccagctctcctcgctcgcccgcctcctcaacgccagcgaggctgacgtcgtcctgtccgaggacgccgtcatccggctcgttccactcgctgtcggacccttcttcgctcagggcagtgtcctggatgaggctggcgcccgcggcaaaggcaagggcaagcggcgggcgtccgacccggcaaagggaaaggaaggcctaaaggagatccgcctcgaggctctcggcgtcttgagagcggtacgttggcggctaactgcgtctgatcaactcaattgaactgacttggtccccctttccgtcagatcttcggccgctacgagagtcagcgcgcttgggtcatccaggaggtcctgacgtcgctcgtcaagctaccagacatcaagaaggcgcaaaagcagttccggtccgtcctagaggctgattcgtccgagtcgtttccgattgtacgatctaaccctttctggctgcgatccgcctagtctccgagacggccaagcgatccacatcgtgacggccttgctgctgcagctcgtccagtcatgcgcgcacggcgtcagtcagcagatccgcggccgccgcttgcgcgacgagacccgcatgatcgtcgatggccagccggacgaggttgatggtcctccgcagagctcggccgacgccgagcaggaggtcagcccttcgctcttgctgcctcggccttgcctgaaccaaactcacctccacttgctgctcgcacaggaggctcagatatacaccgcgtcctgcgaagcggcggcgcggatcgctaagtcgattgcctccttcctgacagtctcgtgcgtcatctcagttgtctcgagcctctgtcattctttcttaccaagccgctgaaactcccttcaatccaatccagatcggcgtctagcaaggcatccaagagcagcgagaaggagcaccgcgccgtcctcgacatcgtccttcaggacgtcctcacagtcctctactggccagagtggcccgcggcaagccaggtgctcatgtggttctgcaagctgatggtcagtgccctcggggttgcttctgaagcgggccgggagtcttgaagttgacgactgctcgaaccactcgcagattgcctcgctcaaggacgacaaggtctcggccgaggagaacgccagtaaagccatcgcgctcgaccagctcggtcatatcgctgctcggatgcggatctcgaccaacaaggccgccgcgcgggagcgtgacccggcgtccgaggctatctctggcacgcagcctctgaccgacgtcagtccttcgctcaagcccccaactttgagcctgcactgaccgggctttcctctgtgtctcgttgcggcagatcgtgcgcaaggcagacgtggcctcgctccatcggctcgagaagatgcagatcgccctgcttgcgtatctgcggcgcgccgccaactctgatctcttcctcctcgtacgtccattcgcaagcatctcgcttgccgtgcttcaccgccgctgatccacccttgtttcgccctttcagagctcatatgagtacagcgctagcctgtggggccaagagctcagcgccgagcgcctgcgtctacccgccacgtcggccaccgacgccggcaatactcttgccctctcgtcgcagggcgacggcggcggcggttccttttcgcaaccctctgtcgcagactccgtccgcaatgccctcaccgccctttggactgaggcggagacacaggatgtttttctcgacgagtgtgttccacctaatcttttacagcccggccgagactgaccggccctctgccttccgtctgcagcgacgaccagccgacgcagattgacgccatctcggaggagattagcctgtcgcgccctttcggccgcgccttcgacgcgatcctcggtgccgtgctctctgcgctcgagtcgcactcagtgactttccggacaaaggcgctgcgcgcgctcggtcacattctcgcgaccgactcggccatcctcaacctcgtgggttctctcatcttgagtggtcacacgctgcctcgctcctgaccagagctgacattctcaattcttcgcaggctaacgttcggcgagcgatcgagaaccggcttaacgacccgtcaccggctgtccgcgacgtcgccgtcgaactcatcggccagtacctcgtcgtccagccgattctcgtcgaaaagtatcttccgcgccttgccgagcgggccgacgtgcgtctcaatgtttatgctgagcgcctcgggtgataagccttccggctgacatcttttcgtcccgcgtcgattgcaggattctggtctcgccgtccgcaagcgggtcatcaagctgctcaagacgatctacagctccctctccgatacttcgcttcaggccatgatcgctatccggctgattgaacgggccgatgacgaggacgagacggtcaaggtgagtcggtcgtggggtcgagtcattcagggcgtctgcaatcgactgacagctcgtcgtcacaggacctcgctgtcaagacgatcgaagaactctggttctcggacctcgccgagcgcgctcactcggcagacctcaggtcggcgtcgcccgcgacgtcgggcggcagcagcgcactcgagcgaaagacggccgtcgtcatgactgtcgccggccacttccgcgagcgtcacagcgcgctcgagatcttcctcacgcaggtgagggccgtcccgcgttcgaccagtccttccagagtgctgacccactacgtcgaccacctgcagattgtcggcgacaaagaggcgcatcctaagcacacggccagcgtcttccagcacttcaaggaaatctgcgaggctctcatcgacacgctcattgacgcccacgatcggccgagcctggtgcgcctgcttcttgagcatttgatttgagggatcggctgtcaacctgatcaccttgcgccctctgcagaacgtcgccggctgcgtccacgccctcaatcagttcagcgccgcctttccggactgcgtctcaagcagcaaggcttcgcacctgctgccgtatctccggcattcgcaggcggtcagtcgaatcacctgtaggcgagagatatggcagagatggttgaccattttccgtcgccttcgcttcaacagcctgaggagcaggccgtctcgatcagcttgctgcgcattttcaaccgctcgatccgcaagatgcccaagacgtcgctgagcttcgcgcaaagcctcgagaagaaggtcctcccgctgatcaacggtgccatgggcggctatatggtgcgtgcggcggacccgagagctctttccttgcaagacactaattgcagcatgcgtcaatccgtgcagggcctccaagagtcgatcgcctgtctctgcgtcattatcgaccacctgacgcagaactatgagcggctcgtccgcctcctcggcagctgcaccagtgcgtcacccggtggtccgctcgtcactttgcggtgccctgactgacgcatcacccccattcgtccgtcacaggcaagctcgagcagatgcggcgccgctaccaggagaccggccagatgcccgagcccaagatccaaacccagacgcgccctctgctctacattgtcgcgctcctcggcgagcactgcgacttcgatgagctgcgggcaaagagcgagggtgagtaaccaacaagtcaatcgagttggacagccacaaccggcagaggctgactgtcgacgtcgtcctgcagcacttgactctgagctcaatgccatctcggaggtgaggcgccatgcctgcctctctccagtgagggttacctgactgatgccatccaccctgcatcgctttctcaggagttcatgtcagagtacatctttgacctcgtcgccttctttgacaaggcgcccgtcgcgcctgacttccgccgggctgccctccagtcactcggtgcgtgctctggcgttcgctgatggacgcacaagtgcgagacgccgctaaccgttctctgcccatctcttaggtttcctgttccgtgcctatccgacgctcatggtcgagccctcaagcctgaacgtaatggactcggtctttgcctcgaccgacctgccgaccaaggcggttctcctcgacgtcatccacgacttcctcttgacgcaggccgagcgcgtcaagaaggatccaggctcggccgcgacgcgaggtgcgtctcctggtagactcaggtcgagtctcgccaaaaaaatgctaacctgaggctgccgaccaggcgcgaccgacggcgtcaacatgacggagctcatcggagacaccgacaagtttgccgagtctgggtgcgtctcgcggcttctggcttgagcttctcaattgcttgccgtactcactctcgtcttccgcggccacagcgtcggctccaccatcgtccagcgctacctcttgcagattctcgacgccgcccagcacgcgacgaccgagcggatcgcggtcgagatcattaccttcaccgtccgccagggtctcgcccatccgatcgaggtgcgatcttgtacagctttcgcaagtggcgcaggccacgctaactcgaagcgatcatctgcagctcacgccgatcgtcatcgcgctcgagacgagctcaaatccggccctggccgagcgggccttcagcctccacgccttcctccatcataagtacaactcgattgtcaatacgcgctttgtcgagaatgcccgggcgtgctacgcctaccagtgcaagacagccgagggcgtcgtccgaggtgcgctgaccttcgacgagctggccctgcgtccctcgctgacgctgctatctcctcggaacaggctttcgtctcgaggtcacggtcgcgtcggccgagcccgtcgcagaggcgcttctcggacgctggtacgggctcgttcgcgagaagcgacccgtccggaaggactacctccggcatctcgtccggccgttcgactttgacacgatcgcggacccctcgcagcttcaatgcactccggtatgtccgccgccacagactctgtcgtagcacgccgcctgacactcgctacattcttttgcagttgcacgttggcttctgccgcttcctcgccgacaaccttgccgctttcgattacaagacgcaggaggaggtctttgtcgtcgtcgagcgcctgacggccatcatctcggtcaccggtgtccacatctttgacctcctctcgcgcgccaggctcgattttgcggacggcgcacggtcggccgaaggccagcgcgtcgccgttcaggtcatcgcccatagccggggcctccagcagctgaccgactcgtcgagcgaggcagacgaagtgcggcagttctcgcttcgaatcagtctgcgtgcgcttgctgacgcgcctcttgtcctcacagctcgccctcggcagcgatgacacggttcgcgcgccggcgaaatcaaactcgacggtcctttacgacgcccaggcgttgaccaacctctcgatcgtcggctcgctcgcgtatctgctcaaggcccacctcaaggcgctctaccagctctcagaggacaagtgccgcaagtatgatgcggccgccaagaaatcggccctcggagacaaggcggccgttcggcgaccgggcgccgcgctaacgctcgacctcgggtccatcccgttcgcactcaaagacgtcaagacgctcggcgatgttgccgagcagtgccttgccgtacgtccaacgagctgggacgctttcttgtcgagccgctaatgacgcctcctccaacagttcgtcaccatctctgaagaggacggcacgaacctcgagcccgacgacgactcggcctgaaggtcgctgctatcacttctccctcgtattttaccctacctcacgacgttatacgccctcctgccctccatttctcacgatctctcggacgacctttacctttccgcgcacgatgccatgcgttgacgattctggttgaccgcaagtggccctgccgcgacgtacgcattgtcactgcgaaagcaagacgcagggcgaacgcaggcgcaagtcgtctgtcctgcgagagcccgcctcagcctggcatccgacgacgaaggggcgaaaagagaggaggaggtcggcgccaggcgcgggtctcgccgtcgccgccgctgcagctctcgcgcggcccaagcagagcaggctcagattgacccttgcagactcgaccttaccctaccggcctggcctctctcacactcttccctccagactctagccgcgctccgcgtacgctgctcagcaagcttccgtgcccagaaccgacgtccacagtcgatcgtcgcagctttgtcgcacgagcccgcccgccggtcgcaacctcctcccagccctctcgagcgctggtcattcgagcacggactccgtctctcccgcgccatcgtcagtccctcgctgcttctcgttatcgggctggcaagagatatggttgccgctgtgtctcgctgtctctgcgcgctcgggcgtcggtagagtggcgggtgctcgggctggactcgatgctcgtgactgggccgggctagctctgtcgctccggcacgcacgcccctgagtgcaggtagctgccggctcgtcgggctcctcgccagccgtcgcgcatcgagcgagatggtctccaggacgctcatacagctgagacaggctgctgaccccttcgcgctctgtcatgcgtcggcccatctcgtagtcgtcctcgaccgactcgccctggtcacttttcgtcctcgtccctcggctctctcggtcgaccttcccaagctcccgttcgcttgccttctcgacgctcgtgtcgataggctagtcagctcgccctgataccctctgatacgatggccgacgctgctcagccgcctgccgcggccgccgtgcccgaaggcaccggctcctcaactccgtcggctgcctccgctactctggaaccgccgaaaccggtcgctccggccatgccggccaagacgttgtcatgggcctcgctcgccaagcagaacctccctacccagcagccggcctcgacggcacccaagccgacgacctcgtcgagcaaagcaacgtcgtcgaagcggccgagcggaccgtccccactcggtgcgggcaaatctgccggaggaacgtcgacgactaaggcgtctggaggcggcagcaaggtcaacggcagctcgcagaagtcgactggagccggcgctgggccggccgcttcggccaaggacttggacgagcaccccttcacaacggtgacgacgtcgcgcagcgcgtcgagccgttcagtcgactggcgacggaaggacgagaacggcgccggccagcctaaggcgcggcgggtcgagaaggagaagggcgacaagccggctcaccggcacggcgagaagaaggctgggccggctaaggagggcggcaagacgggtccgtcgtcggccaagggcgggcccaagaaggccgacgcggctgcggcggctggcacgtcgtcttcaacaacaacaagcaagcctattgttgaggacgatgcgtcgacgccagcagcgccggccaaaaaggacgacagcccgcaggagtcggcaagtgcagcgccggcagagcatctgcccgtagcagagccgccagcggcagctgagccttcgacggcggaggccgctccggctacgggtgccacgccagctgcgatcgtagaagagcagcccaagcctgctctcggagagaccaagtctgccgaggcggcggtggtgacgacgacggccgaggaggcccccgcacctccgccagcgccgaaaccgaggtcggtcgcaaagccgccggcggtcaatatctggaagctgcgggcctcgtcggctggcccggcaagcgcgcagaccaagccgccccctaagggctttccgacggcctcggccgccgcggcgatcgcccaagccgccaaggccgagtcgatcccgacgccatcgtcctcgcctccagcctcgacgacctcgctgtttacaccatccaactcgtcagcgacgaccgccagcccgccctcgacacttccggcgacttcgacgacgccgtcgctcgccgacgaggcttggcccgagccaagtatggctgcgaccgccgcggctacgagcagcagagctagcactgctgctgtcgaaggcgaagaggtcggtaaggccgctcctgccgctgagggcgcgccgtccaagacgaagaagggttcgtcatgttgcagacgtcgacatttccaggcgcgcggaggctgatcacgtcctctgtccgctttgcctactcagagaagaagaagtgggtcgccatctcgccggctgagctccaggcctcggtcgaccaggccaacgcggcgagcggcaagggaaagaagacggccaagcggccgacggatgacgccgcctcggcggcgaaccgaacggcgcccaagaagaagagtgtcggcgagggctcgatgaccagccagcagtcgaatgcgtctgccaacggcacgaccgcgccaacaaagaaggccaaaaaggccgccgcggccgcgcttgcctcgtcgcaaggcaacggaggtccctcgggcccgtacccgccgccttcgctcatccagcaccacagcccgcacctcgacaacttccaaccgccgccgtcggcgtacaaccctcatctggccgacatgccgatcctgcccatctcgcacctgacctcggccgaagagctcgtcatgccgcaacactttgacctgacggccggccttccctcggccggcccgctcagcgcgatggatggttcgctcgacgccgacaacgtcgaaatctccaaggacgtcgagatgagcctcctcaaacagtcgggcggacgcgcgaaccttggcggccgcgtcgagggcaacggcgttcctgccgacactgccagcctgctcttgaaagaccacgaggccatggcgctcggaggtcagggcccgccgccctcgacgtcgtccttgatggaccgcacgcggtcggctccgctctctggcgctattccaatcatcgccccgccttcgaatggcctcaacgtccaatcgtcggtcttccggcctgcgaacgccggtactaggagcccccgtgggtcggcgccgacgatgcgtggcggttcgagcaacgcctctgcctcgggcggtcgcggcggcagccagtctggccgcttgccaggcgcaaactacactggacggccaaaccccttcgccggcctctaccagcaggggccaggccagccgggctcgcacgacggccgcaacccctacctctcgcctcctccctcaggcggcccgcccctcggtcccggcggcctgcccccatcgccgcactcgtctttcggctcatatccgaaagacagcagcatgcctcggctctcgccgcaacaggtgcctggctcgttcggctccttccccgctccgcagccgccgttcggccagccgacgcaggctgccgccggtggctcgagtctcggcctcagcaacggtcccaccggtaacggcgctccgtacggcgcctaccacgcgccgccgccgatgccgctgcctgtgactgtcccgacggtccctctcgagccgctgcgcttctacctgctcggccagcttgagtactacttcggcgctcacaacctcgtcaaagatttcttccttcgtaagagcgtgcgtatccagcctgctcgcctggacctctcggccggtcgctgacccgctgctgtctcccgctctacagatggactcgcttggctttgtcgacattccgacgatcgccgccttcaaccgcgtcaagacgttgacgctcgacctcgccctcgtgcgcgaggtcctgctgctgtctgacctcgtcgaagtccgcgagcagaaggtccgcctgacaagttgcggctggcaacagtggctcctacccgacgcgctggcgtccgactttgaggacgacgcttcgtctcctgctgccgtcaaggccgaggcgcctgaaggcacggcagacaagtcgtctgcagcggcccccgaggtcgcgcttcaaacggtcgccgatgagaaggccgaaaaggcgacggcgaccgagtcggctgcaccgtccgccgccgacggggtcacgccgccggctggagctctggaggccgacgaggagttgaaccagtcatgacggtagggcccgcccttcttcgtagccaacgtccgcgtgcctcgtgagtctgaggctggctccattcccttgaccagctcaaagctgaccccaaccttcctacccaagtctcttcgcttcgctcccatcttccgtcccggagaaaacccaattcgtcaagaagacccactctacactagagcccgtcccctaaaagcaacgcctctgtcccagccccgaccactccgccttttcttcatcgtacgtcgtgcgatctctctcgcagctcactcgacgtctcgcatcgactgacgcgacatgtctccgagcgcagtatgtccgccccgtcatttcccctagcatcaactcgctcttcctccttccgccgctctacgcacctcgaaaattcagaccctcgcctcccagctgtgcttttagcccccccgctctccttccctcccctccaaagaaaaaaaaacaagtctgcgtgtacgatcagtcgccgagctcgccctctctcttctcgctttcctccatgcatggcatggacctcgctttatgtgctttgcgacaggcgacagactgatggcgagaagagtcggcccgcatttcctccgtgtagggacttttctcgccgacgagtctgctggtcggctctgctgcggatggtctctcccggcggcggcggcggagcagcagagagctcaggcggcgcaacaagcacgcgctcgcgcctcgagaggccccgtcagcctccggctctcactctggcctctccctctccggagccagtcggcaggcgtcgggtccctctgcagcaggcgactgctgctgggccggccgctcgctcggcgtaaaggctcctgcgtggagacgcgtgagaaccttgatgagccggagagagagattggccgaggtttcgacgtcgactcgccggagacgagccctcgttgaaagggggagagaaggagcaaggctgaagggattaaccgttctctctccttccccaccacaactctcttgcttaactccaacgtatctatccatcacctactcgcagcacccagtatgacgtcggccactacggagctcgctgccacgcctgccttcccctctggcttccactacggcttcgctacggtccgttccatcgccaggtctgcaggcgtgtccgacgtcgacagcgactgaccgagagctacgctaaacaggccagcgctcagatcgagtctggcgcagacgagggcggccggggtccttcggtgcgtaccttcagcagggcgcctcgaccccaccgcgcgctccgacaggcagggctgacgaccatctcctgccctcagatctgggatgacttctgcgccaagccgggaaacattcgcgacggcacctcggtcgccgacacctgcgaccatttccggctcttcaaggaggacattgcccgtacgtgtgatcagccccgacgggtcggcccgaggagctgatcgcagcgcagccgactgaccgtctctctgctcccgctccgacgcgccggcagttatgaagtcgctcggcgtcaacgcctatcgcttttcgatgtcgtggtcgcgcatgatcccgctcggcggcaaggacgaccccgtcaacgaggagggcatcaagttctacagcgacctgattgatgagtgcatccgccagggcatcacgccgttcgccaccctttaccactgggaccttcccaatgccctccagaagcgctacggcggctggcagtcgccagagatcatcggtgacttcaccaactacgctcggctctgcttcgaccgctttggcgatcgcgtcaagcacttcatcacgatcaacgagccctggtgtgtcgccatcctcggccactcgtcgggtgtttttgcgcccgggttcaagtccaagacggcgccctggattgtcggccatcacctcatcctcgcccacgcccatgctgctcgcgcctaccagaaggggtttcagcccgcgcagggcggcacgatcggcatcacgctcaacggcgactgggccgtgccctacgacaactcacccgagcacgtccgggccacgcaggacaaaatggacgccgccgtagggtggttcgcggaccctatctacctcggccactacccgcgctcgatggtcgaccggctcggcgaccgccttccgaagtttacccccgaggagatcgagctcgttcacggctcgtccgagttctacggctgcaacacgtacactaccaacactgtcaaagccaacggacgagacgaagtcgacgcctacgccatctgcggctttgacagccctgacggctcgaccgccctcggcacgcagtgttcgtcttcctcgcgcaccgccgccgcttcaggtatatctcaactaactgacaccgtcgtacttcttctctcaaagcggaggagcgctggctgcaggacgtcccctggggattccgcgcgctgctcaactacctcgccgcgcgttatcagaagccgatctacgtcaccgagaacggctttgcggtcaagggcgagagtggtctctccaaggagaaggcgttgcgtgagtcgcaggttctcctcttgcaactgttgccgtgcgagactgaccgcatctgctcgatttagacgacaccgaccgggtccgcttctacacgggctacctgaacgcgctgcgcgaggccgtcctcatcgacaaggtgtcagtgctgcttctcctttgtgccttgcagaggtcatgtgctgacagtgtcgcttgcttatcttctcctcagcgacgtccgttcgtactttggctggtcgctgatcgacaactttgagtgggcctcgggcctcaccagccgcttcggcagcgtctacgttgactttgagacgaaggagcgcacgcccaaggactcggcctacgtcgtcccccgcttcttccacgagaacgtcgcccgcgcttgagcaatctgcctcgacgatcgcctttctctcagccacgcttcccctgtacaacccgactcagaccagcctttttttgagattgctactctgcctttacgtatcgacacgccccccccccccccttttcctcgaccttgaacgaaattagttgaacatgaactcttgcgccgacgaccgcgctcaacaagccagaatgcgatttcagtcgtcctgcaagcatggcagacgcatttgttgcgactcagagctcaggaaggcgacgacaaggacgcgcgccggtgttcgcccgagcgcgacgcttcgttcgccgcccgaactcccatccgccatcgcagcctcgctttgcctcgctcctctttctccacttcgactaccccccatactcccctagacgcagcgcgcgagacgcagaggaccggatggccgacttcaaggacgtgcccgagttcatagaggtacgtttgccgtccttccttgggcagcagcagccagcgcgctcggccttccgtcgcgttgcggctcctcggctgcgctcgctctcgcaaacgccctgcctcaactcgcagccaagacctcacgcgtcgctggaggacgttcgtcaggctgcagagagcatcacacgtacgaatggagggcaacaacagcagcaggcaggagggatgagggcagccgcggaggtgtcaccgccgacagcagcagctcggctcggcatcgcacggctcgccttgcgtccctgaaaaggccgcctgttcccggccttgcatccctcctggccttgtagcgacctccgactgacgctcgacatcgtgttcgctggccttttaatagggcgacatcggagaggcgctcgcatcccggacagaagctctctgtgggtaccctcctcggtcccgctcgcctccaggcacagtcgagctcccgagacgccgagcccgggctgacccctccgccttctgacccgttgccagcctcgtttcgggagctcggaggccccgacttatgccacgtcgtcaaatcgaccggcaagagcgccgtcaaggacgtgagtcgcttctcgccggcgcgcgtccccctttagacctccgcgcggtcgctcacacccaccggatctctctgcaggtcggctcttaccactacacgtcgggcgtcgaggcgtcctcgtccgcctcgctggcggcctacctcaactcgcttcaatttgagctcgaggagatggcgacctggttcagcaagggcccgtcatggaaggtccgaagcgggacgtactggtgagccaagctcttcccgacgcgcttcgccgggcggcggcggctcccgacccggtcgactgaaccttccttgtctcttagctgcttcaacgccttttcgagggtggacgtccgagtcgacgtcaagatccccggcggcgtcgatggtccgtaggctgccgtccatctggctctcggcatcagatgttgacgaccgcccctcccgatccaccacagcctatgtcattgacctgcgaggcgagcggtacgtgtcatctgtcgagctggctgagaccaacataggttgcgtcctgatcgtcttctgagcatctcctgcaggcacgagacgacggccgagatttggcaggagacctacatgtcggcgctgctgcgggcgatccgctacgccgacgaccccaattaccggctctctgggtccgcctgccttctctgccactccatctgcgcagcttgaagaaagctgaccttgttacctttgaacgacagctaccggaagctcgacccgataacgacggtcgacgctgagacgcgctttcttcaggccgcggagagcttgttcttcaagggtcagcccagctccaccactttcattgcgcgctcgaccgctgacccctcgcccctacgatcgcaggctggcagctcggctcggaccccgagatccaggtcgcgacgcttgtctcgaaccacctgacggccggtctgctgaagtactttggcgactcgtaccgctacgagcgcgtcgtcaacctctttgagcggctactgccgctgagccccgaggttgcggccctcctggcaacgtcgtacatcggtatgagtgagtgtcgtcccgaggctggacacttgagcgcgacaagctgaccaggccatcgcacgcgcaccccactccagacgaggaagtgaaggcgctccagatcatcaacattgcgctcaagcagtcgcctcagtcgtacacgctcctccacgtccagtgcgactttctccggtccaagggccggctcgactgggcgctccagctggccaaggaggcggtcaactgcgcgccgagcgagtttgtgacgtgggccaagctgaccgaggtctacgtcgagatgggcgagtacgagaacgtgcgtccctgcgtctcgggcatgacatcttcagcctgcagctttgacctcccttgaccctcgcaggctctcctcactctcaactcgtgcccgatgttcacctacaacgaacgcgacctgcaccggatgccgacgccagcacggacgcacacgccggtccggtctttcatcgccgagtccaacattctcgacgaagagagcgcgctcgacaacgaggtgcgcaaatgcgttcgccgagtcgggacccagagaatcgcgactgacacctcattgtcttcgtttgcaggccgacgttgcgctgctccgcctgccggcaccctccctccggggcaccttcagcaaggcttacaccctgctcacgcggctcgtgtcgcagatcggctgggacgagctgctgcgcacgcggtcgtccgtctttgtgatggaggaggagtaccgccagcagaaggcaaagcccgagacgagcgcgccacctccggcgccagagagcgcgagtgagccggtctcgcattcgcgcgacagctcgctcgcgtcgtcggccgacgtcgggccaggcagcaaccgcaacggactcgacgcgccggcgcaagacatcccgacgatcaagatctcgtccgagtcggaccgcgacaaggaggagctcgagatggccaacgccgggctcaaccttcacaacgtctcgctcgacgtcgaggccgaaggcacgatcgtcgagggcgacgagtcgtcgaccggccaggctgcgacgaacagcttctcgcccgacggcgacatgacgcccaagctcgagaagcccgagcttgcccagcacccggccgacgacaaggagagcggcgccgaggcggctgagggcgccgtcaaggacgacgagacggcggccgacccggagccggacgacaagttttccttctcgaccaagcggctgtgcgagcgatggctcgacaacctgttcatggtcctctacgaggtgcgttgcacttggccgatgtgtgcgtctgaaagcatgactgaccgcgtcctcgctcgccgctcgtccccgcaggacctccgcgtgtacaccatctggcgggccgagatctcgcacttcaagacgcagcacatgtcgtaccgcaagacgggcaccgaggtacgtcgggcgagcccctttgcccatcgagtcttttgctgacggaaagcgtaccttgcaccacctgcagtgggagatcctcggcgacctcgcgctccggctccagcacaaggaggaggccaaggacgcctaccagcgctgcctcgactccaagttctcggccaagtcgtggcagaagctgctcgagacgtatgccgacgagggcgatctccagaagacgctcaatgcggcgacccgcctgacgacgtacaactggcgctggtacaccgagagctgctacccgacggccgtcggtgcgtcctgttgcccttcctttctgctctcgctcagacctgacctatgtgccatccgcattgaatccagcccacgagatcttcaagatcggtcaggtccacggccactcgaagattgcctacacgctgctgtcgatggtgagttcgccctacgcacgcgtgtgctgccctcgacttgctcctgaccacctatctttgccgtccgccagaacctgcccgactccatcctcggcattatgcaaaactacctcaagaacggtgcgaccttccgcgtcaagggttcagagttctagatgggtgcggcgcggcgtgggcgctgccggatgcgatgacagatggccgcctgagatcttgcacctgccgcccgtcggactgaggctcttcgccagtctttcagagcgtttgtacagcgaacgcatgccctcgattcatcgacaaggcggtcgaccctttggtggcgttgttcggcgtttcgcgccttctcttgcgcgccgcgcgcggtcgcgtcgaggctcgagaacgacgcgcctcccttcgcttgccctccgacctgtcttctcccctcttcgcttctctcctccacaaccttgcctgagatggacgtgagcctgcctggacccgacagcgccttcagccggtcaccgcctccggccattgagacgccgaggaggcacctcaagcagctctcgctcgcctcgtcgtcctcccctctcatcgctcggccctcgccttcctcctctagcttcggctcgccgagcggcgcgcctcgttctccggcaagccggccgccaggctcgatcggacgtcgctccggccgccagtcgagcatttcgtactcgccgagcatcagaagcgtcgcaccagacgggccaggcttcgacggaggctcgagcggccgagcgtcacccgtccgaggaggcttccccccgcgcagctcgagcgacggcactcctctcgacccgatcgagtctggccggtcgagcggcgagtacagcggtcggatcccgctcggtgacagaaacggccgcctgccggtccaatcgacagcagagaaggcggccggcgaggcggccgacgtcccgtcgccgctgccgtcaacagggcgcgtccggtcacgctcctcgctctcgatcggctcgaacgggtccctgggcgacagggagccttcggcaacctcaaacgagcctctgacccttggcgagcagtgcgttgttcctctcccgatcctcgcgctgcttccgatgagagcaggatgctgaccttagctacccactaccctcgtgcgtcgtcctcgctcaggtacgccactcttctttcgtccatcgcacgcaaggagtcgaccattctcgagctccgcaacgcgctcagcacccatgagaaggagctcgccgatctcaaggccgagtggcgcgacctcgcggcgaccaacgccgcaccaggcgtctcgcatccgcagccgtccgtcatggaggcggccgaaggtctgctcggggccgacacggtccagagcggcaagcgactcctgagtcttgtcctcggcgtcagcagcgacgagccagaagagaaagagaaggcgccctccccagcttcgtcgcccgcgcccgcagctccgcccgccgtgccggccaagacgcgcaagtcgatgcctggccggtccagctccgacttgatgcgctcgctctcgggtctcgagcaggtcaccgaggcgccggaagagggtccgtcggccgaaggctcaccttcggcttcgacgcgcacactccacgacgttccgccatcgacttcgcctccggcagtccggacgtttgcttcaggccggccgacgcacccgcgcgcatcagccggcaagcgactgtcgcttctgtcgtcgacgtcgtccgtctcgtcccagagctcggtcgacacccagccttggctgaacaacgacgccaacacggcgcaggtcgccgaggaggaggccgaagaggctgccgacggaaaggaagtcaagggcctcatgtcggacctcgcaggcagcaccggcggcggaggctggggccgcaagtttggcgacctcgcggcgggtctcaattcgaacgaacagtgcgtcgaccgtcagctttgccgaggccagcgctgacatgacgttttccccttctgattggcagtttcctccagtcgaagcgggcgtcaatgtcgtttgcgtcgtcgttgacgagctcgtggtcgtcctttggcacgatctcacccttgaccctaccgccactctctcaaaaagcggcgccgccaaagtcgccgtcgcccctccctcggacctcgcccacgccgtcgtcgacgtcgacgccgcgcaagctccaggcgaccaagatgcggcccatcagctcggcgacgggtgcgcgtcagctgacgtcgccgagcaacgccggcttcccgagtggcgtctcgtcgacgggcggcgacttcttcagcgacatggccgactcgggtccggtcaagctccaggcgccgctcgcgccctcgggcggcttccctgccgctcgcctttccgagccggctaccagcccgagccggaatgggattgcgccggccgcccagaccgaggcgaccgacgactggaactggtagagcgcgccgttgtcggccgcgagcgagccacagaggcggggccgctcgtccccttgtgcatacttcacgaccaacgacgacaacttgtagacccgcccatccttctcattcatgcacgattgacgacacagctcctctgtggccctcagcaagctcgcgaaaacaaggagaagaccttcatggattggacgagcgcagcggtattgtcggccggcactcgtcagagcgagggcgagggcgatggcggggcgggcagcagctcgacgttccactaatcctgccatgcgacaccgatctggtccttgtaggtaaggccgacctcgcgcagagcctttgcccggagggtgagcgcagtcgccatccgccgattgtaacggctggagtccgaccgaagagggaggaaggtagagaacttgagtccgctgtcgccgaacatatagctgtcaatgacggtcgtgagggactgaaagcggcctggatgactccggataatgttgcagaggtgggcgacgtcggtcgtggctggctttccgtctagcgaccagctgagtgtgaggtcgatcagactcggctgcgcagcgttgagggcgccaggagttcgacagtagacaatgttaggtggagaaggctcggcgagacggggaattccagcggggaattgtccgccacacgaccgggaacgagggtgagttcggtcggggtagggcagaagcggttgatcgcttcgagcacggcccgagctggcctggcgggaagtcgcgtaagctcaggcgggtgatcgtcgacgggagatctgcgagaacggctgaagagaaggcgagatcgtagtagtgccggaggctgaaggcttgaagggcggacaggtcgaagtgcagcgcgaggggcgtcgccgagtcggtcatttcgagcgagatcgagcggagagccgaaattgagagcggagtcggcagcgaagatgacacttgcgggccccagtataggcagtccaagctcctgagggcgggcagccggtcgcgttgcaggaggatcgccttgtctctccgatgcgggagaagcgcaggtcattgtgctcgataagcgccgcgacacgcggcttgctgcgaatgaggacagaggccttccggctaagcggacagacgctttggtagagtagtacctggccctcgggctgagaaaatttgtgcccaggatgagaaggctcgtcagcggccggtcgaagccggggtctgcgtcttcgcagcttgacgcatccgccaatcttgcgagacgaggcagagctccgagagccgcttctggccgccgttttcgccctcgattgcaatacttgcttcgcggaggatgacgagctggatctcgaccagcagacggttctggcgtttctgaatctggagcagaggcggcggcagatgcgcaggagggcggcttcagctgcgggcccgaccgccgacggtaagcgagcggctcgcggcgagcagactcacgacacggatcgaccggcgcatggtgcggtgcgctgggtgcggctatcagtacgtcgagggatctctggtgggtacgttgcagagggtgagggcgcaaacaggcaggacaggctcggctgaagatggaaggagatcgcgatgggagtgcagcaagcggcggcggcgcacgcgcggacaagcgacccgagaacgctgccgtgcgccaccacgccggctgaccagcgcggccgctcaagacattggtcggatctcgctcacgtcggccgcacctgactgctgggcaggtgctcgctcgtcagacgtttgagcggcagtcctggcaggcggtgaggcctccagcggctgccctgcaggtcgcgtcgacgcggatgactttggcggaggccgcgggcgaggacgaaatgacgcgggcagcctgccaggccagctcgacctggccgacccaggtagatccaggcagcgacttgcgacctggtctccgtgtcgaccgaggacaatgctcatctccctgcagcccatcgcctcgaagcagctctggtgctgcgctgtgaaacgggcccccggaggtgaaagggccttcgtcgcggagaagcagacgaagcgcagcagacactgacgcgcgtgatgggaggaaacttgagaccggccgcctgcgagagctgctgcgacgacctacagcaagccggatacggccaggatcagacgagcagtctctttctcagcatatactgatgaccattcagagagaggttgctgaaagaagttggcccggacgtgcgccgtctcccaccaggcggtcgatcgaccgtcgagctggcgcgacctctgcccgctcgcccgccccccttgtgctcgcgacgcggcgccctgccctcttgaccgccggccgtctccctccttctctttccctttcttcgcctggctaccacccctctctcccaaactcccgccttctcactcctgaccgctcgtcggtcagctttctcctcccgcccctctcctcttcctgctcgctccggccgccgccgacctccgacccgtcagccccgacccgctcctcgctcaacagcccagcagcccgctgtccggcctccctcgaccccaggtcgacgcgtcgttcaacccgagctctacccgacgccctcttctccagcctcatccgaccggcgtctccatacgagacgatggcgagcggcatccccgtgcgtcctgcagccctcattggcctgtcgtcgcgccgcgcgcgcccgtcgcctcgccaggccttttgcgcgcgcgcgccgctagatctcccagcccgcctctccgacccggccgctgacgaccaccgtccttcctcctcctctttctcttgtctatcctccttgcgcgacggtctacctcggtcggtgctctttctgctcgtcgcccctcgctcccttcttggcctcggtcgatgccctctgtcgccgccaagcagacgaccaggcgcacgacccgcggcacgcgcgccgccggcggcccatcggtcctcgacgagaacgcccacctccgagcgacctcgactgcgacaggcctctctgctccggcaggctcctcaaaggcggccggtgcgactggaaaggacgccggagccgcaggtcgggctggcgcgtcgagtcgcgccgctggcgccgtggccaagacgtccaaggagccggcggcgacgtcgtcgaccgtcggcggcaagcagaccaccatcgccacccgccgacgtgctgctttcggcgaggtcagcaaccggaacggtggtggtgcgtcgtcgagcacggccgctggcgccagcaagaaggcggccgacggcaagactgctgccgcgccgccaaagcgcaagactcggacgtcgctcgccgccgagcaggctgcggccgacctcgaggctctccgggctgcagctggtagcaccgaggctatggccgtcgacgagcccctccagcaggcgaccggcgtcggtcggccaactgccgcgtcccgccatcgcgcggccgcaacgacctcgacgcgaccttcggccaagtcgtcgacgacggcggcgaccgtcactggctcgagccgaacgaccggaacggcagcagctccatcaacgacagccgggctgagctcgcgtcggatagtccacggcgcgtcggccgttggccgagtgggaggcgcgtccgcagcagcccccccgaacgcgtctgcgaccgccggatcgtcgtcgaccgtcaaccacccagtcaaacgggagaagacggccccggccgacgatgcgagcggcatcccgccagcggccaagcgcgcacgaacgtcgtcgcccgaaaaaccgacgccgacggtcgacgacgtccagaagaccgagagctgggagtacctcgaggagatgcggtgcgaagaggagttcaagctccactgcgagcgcgggacccttgacgaggcggaagatgcggcctacgccaatgccgacgacgacgaggacgccgacgacatggccatccctggcgagtcggccgtccgcgcgcgggcaaaggacgagggctgggaggacctcgatgaggaggacgagtttgacccgatgatggtcagcgaatacgtccgtgagatcttcgtctacatgcagaagctcgaggttggttcctatcttctatcgtcgtcgtctcattggtcgacgcggccatgttgattgacaagcatcctcctctctttgccagttgacgacggcgccgaaccccgagtacatggacatccagcccgagctccagtggaagatgcgggcgatattgatcgactggctgatcgaggtccacggcaagttccggctcctgcccgagacgctcttcctcgccgtcaacctcgtcgaccgcttcctctcggcccgcgttatctcgctcgtcaagctccagctcgtcgggacgaccgccctctttgtcgcggccaagtacgaggaggtcatctgcccctcggtcaccaactttctctacatggccgacaacggcttccaggacgacgaaattctcggcgccgagcgctacctgctccagacgctcgacttcaacctgtcgtacccgaacccgatccactttctccggcgcatctcaaaagccgacaactacgacatccagacccggacggtcgccaagtactacatggagatcgcctgcgtcgaccacaagatgctccacctcaagccgagcgagattgccgccggcgccgcctggctcgcccggcacgttctcgaccggggcgaatgggtgcgtgctctttctcgttatgccgtcgttctgggttcccattgctgaccgctgctctcgtccccgctccccgccagaacgccaacctcgttcactacagtggctttgccgaggatgagctcctgccggccgcccagctcatgctcaactacatcctccggccgcgcgagaagcaggccgagtcgttcgtcaagaagtatgcgtcgaagaagtacatgaaggcgtcgacgtactcgcgcgactgggccgtcggccgctaccgcgaggacggcatcatggccgacgcccccaagggcagcgagctccagtgggacgtcaacgcgatgcgcaccgagcgagcgatcctcgaggagtcggacgaggacctctgagcctgtcgcctcgctctccaccgctggctgcccgtccacgccagcctcgccaaaccctcgccctgcgccacgtccgcttcgctacgacgcaccctcccctgtccctttgcacgctcgatcgccatacccgcacacgataccgctcggtcgtcggagggccaaaccgaccgctcgtcggccgatccacccggaccgtcaccgatccgccaacgacgaccctcccgactcaacacacacagaccaacccgcacgcacgccgatttctcccttgacacccctgcttttcgctccctctccttgctcctttggccttccatcccccatcctctcctctagcaacgatagctcttctcccctttccgcgcgacgccccttctccttcacccctgcaactctttatctcccatgtcgacacccctcgcccgcctctccccccaaagtccttcccctctgctgcggcaaaggggtggggcatgcccattgcgctgtatcactgcctccggaccaagtcacgctcgcctttgcagcggccttcgaccggccctctcaactgtcgatccatttgcccgcccgtcgaacgaagactgctctttgtcaattggcgggccgacgcgagaagcaaatcgatattttctgtataccaactccccttcgcccctacttagaagatacccgtcgtcaccaatctctcgcctggtcgggccgcccacgccgtgcgttcgggcggccagttcgtgtcttctcatgtctacttatgaacgtgtccaacgctggagccgcgtgccgcaaagtctgacttcgtgccattggtcgtctgtcacaaccgatctggagctcatgtcgacgtcggagagcgaccgtccgagtgcatgcctcggagacgacgagcaacgtcgattgcggtcggtcgcgcgcagcagttgccccgacggagccggtgggttgcggtgggctgagccggtctcccttcctgcccgtcgagtcatcgaccgccatcttcaccctgcctgcttctcgcagaacggccctctcgccagcctgccatcacccaccgagcgacggatcatgaccatggcggtcgaccctttcaacgcaaccatctgggcgacagcctcgtcggcagcggcgacctccacgacgctcgcagcagcagcagcatcgacggcctgctttgccctctcgtcggcgagctcagttgattcggcctcgccttcggcagctagcgtcgtcgccactgggtggtcggccagcccgttcgtgaccaccctgctcgctggctcgctcggctcgctcgggctcggcgccctcggcggagcgggagctggctcgtcctccctgttcggcctgctcgccggcgctctctccttcctcctcacgttcagctcgtcgatccgggatgttgcagtgacgcccttgcgcatggtccttgacggtgcgagcccttcccttcgctggcttctgttccctgatatgcgacctgacgctgatcctccacttgcctgccaacgctcgaacccctcttcccatcagcgacttgcacgaccgtcttcgtcgacgccgcctcgccgccagcgacttggctcgccctctttctgtcagagctccccggccgcatctgtgccggccgcgagatcgagatcgaggttgtcgaaggcgaggcagacgatgccgacgatgacgcgcccgactcgtccggcccgcgagggtacgaccactacggccaaccgctgcctccgctggtcgggagtgagtcaattctctcgagccacttcatctcactttgattgcctcctgatgtactgccgaccgctcccgtctctgcggcaggcgcagccaccaagctccaccgcgtccgcctcgtcccgttcgcctcggcgcacacctttctcatccacgagggctatctcctgatcgtctcgcgcgagacgcgtcattcgcactcgctcaccaagggccgctacggcgacgccggccggcgtcagcacaaccggtacagcgacgacaacgagtgcaacaaccagaaagggtctgaggagatcaagtagtgcgtctcccgctccgtctttacacgtcatcgttctgacgctcccttcttgtttccctccgtgtcagcctcaagatccgataccttccgctgccgcgctggccgagcctcttgattccttttgtcgcctcggcccctgcgttgactgctcgtctggcagacccacgtaaggctgtcgaccggctcgtcgaagaggccaaggagcactttgcctcggccaattcgcgcggcagcgtcacgtgctaccgctacgagttcgacagaaacatggtaaagattctcttctacctatcgcaactgatcggctcgctgacgtgctttgcttcgaccctcgtcagaactgccgctcttggagcggtaaagtgacacgcggcaagcggcctctcgattcggtcgtcttacccgacggcgtcggtgcctcgctgctcgccgatgcgcgcgactttctcgcccgccgccagtggtaccgcgaccgcgggatcgctcaccgtcgcgggtacctgctctttggcgccccgggtgcgggcaagacgagcctcgtcaccgctctggcgtccgagttgctggtccgttccatagtgctcctggtcaactactggcgaccagtactgaccaccgtcctgctcgtctcagcttaacatctatcagatcgacctctcggacgacgacattggcgacgccacgctcctctctgccatcaatcagacgccgccgaacgccatcattctcctcgaggtgcgtcgtcctttcattctcgtcagcaaggttggcgagccctccgctgaccaaccagaccgctaccatctaggacattgactgcgccttcgctcctcgactttctgcatcctccctcttcggagcgggcggaggcggcggcagcggcagcggcggcatgggcaggccgctgcgagtagaaacgctgactctctcaggcctcctgaacgccatcgacggcattggcgcctccgagggccggatcacaatcgcgacgacgaaccacgtcacccggctcgacccggccctgatccgaccaggacggatggaccgccagatcgcgttcaagctcgcgactccggctcaggcggccggcctcttccggaacatgcttctccagacgccatctgagctcgaggccctgcgccgggcggccagtccggggctcgagggcgatgagaaggcggctgcgcagacggaagacgcccagggtcggcagattgaacggctggccgacgagtttgcggcttacatcccgaacgccaccttgtgagtcgggtgcggcgcgacccgctcgaactcgactgattgccatcttcaccctgccctgccagctcaacggccgccctccaaggctaccttctccgccacaaggacgatccgcaggccgcggtcgacggcgcagccggtacgtctcgctttttgctgcacgtcccgtgcgctccgcctgacgcccagcgctacagactgggtcatcgagcagaggacgtcggacgaggagcagcgccgcagcgccgacagcgattgggacctccggctgaagctccaggtaaaggaagacgtcagtctactcgcctgcgcggcgcttcagtctacgcaccccgagactgacctttcctgacccctttccagcggcgtgtgcagcgcaagaaggcggagatggagaagaaggcgcttgaaagtgaggacgacaggaccgactctgacggagccggtccgcgcaacaagacgaagcgacgtgaccctgcttccgtcaagaatgaggaggacgacgaccgcaaagagcagatggcgacagagcccactaccctttagaagcctctcgacgtcgcgcacgctcgacgaggccctttcacgacctttcgtgcccagccctcctctgacgactctcatgatgacctttcgctcactcgaggcgtcgacgaatgcctcgcctgttgtcgaagcgaaggatctgtcggcaggacgacgtcaattcattttggtcgaggcgcgacaacgttgttgcgacacgatcgccccttagaagggaaagcagcgatgaagcagcctcactactgcgccctgtccggcgccgacagccctgcaggcgacctctgttgctgctgacaagctgggtcaaggtcgcaagcgcgaggatgaccacgcagtaccccgcaagcgtctctcgcggctgcgcgtgcagggtgcgaggcggggcaagaatggtcagcatgactcgaacctgcatgggctcctccctgcttcttttccttgcacctgttgacgaccgacgacgagcacctacgtaccctgccctgccgtcctggccttttacctcccgctcgaggcgaccggctcgccctcttccgccgcaggagatggtccgggcgtcctcggtgcggcgcagccctcccagtcgcgcggacgacgacggcttgaccaaggtcgtcagcacaggcgtcagcagtcgctcaaaggtctcgttcaacgaaggtcagtatcctcgtcgtgttgccctcccctcccctccaaagctgctgcccgacttccatcgacgccgccaacgtcgagccgctcgtctcatcgcgttgtcctcgcccaccgcgactgcagccggctgccggcggcagtaaaaggccggagagcaggtgtcggccgacgagcggccgctttgaggtcttcggtcggtgcctctctctcttgtgtctctgcgtctccccatcgtagacgagcgtcgagcagcaggtccgggtccggggaacgaggcgttcggcgaaagcggcggcgacgaggcgaccgcatggtgcctttccgccaaggacacgaagtctccgggccgcggccatcgcctctcctctaatcgcctgcagctctcgtcttgcctggagctctgctcgtcgtcctctggccctctcggcgcatgcagctcctagctggcacaaatcctccggccgctgaccctcctgggctcgtaggagctctgctgacctcgggctgccgcgcggcttcctcagggcgagaggtactgatgccggatcgatgaaggaccaatccagaaggacaactgacagagttggtcgggacgctcgcgagctctcggcgctgggcggccgacctccccgccctcgaacgaagattgaggcgaggacatgtgattgaggcgacgcttcgtcgccctggctgccctgctgcctgccagagcctttgctgctgctgctgctgctgctgacggctcgggatggtagcccgatttgcccgcccgcagcaacacctcgtcggacctcctcgcacatgagcagaccataagctgaactggagctcgcacccttgcctgccagcgtccgtccgctgcttccgaccggtcactgacagccgccgcccacagccctgcctgccctgttgttggtggatgcggagggaggcgttcagccgggcgggagaagcctatcgcctctcgccttccctttgattttattatttctcgccccgccaagatacgcccgggtcacgctccgggaagccctcaagacaggcgagggctgaacgaatcgcctgtcgctcttccctcaccgaccctccccctctcctctctccccagcatctcgcccaccatgtcgggctccgaagaggacttcaagaagaacaacaaccattcgcaccaggtcgtgccggcccaccaggtctcgcacgagacctgggaccctcggtcagagtcgctcatgacgcgactcggcctcaatggccggtcgtatacgcgagcgcccgtccgcctcacgtacgtcgctctgagctcgctttgcagctagacaagagctgactgagctctctccctctctcgtcagcgacctcgtcgtccacggccaggtcacgggcgagaacgtcgagaaggctggcgccggcaaccagcgagtcccctatccatctcgcgcgagccgccggagctccacagccttcctcgagctcggctgaccgcctatctctccctgctctcaggcttcagcagtcgatgaagcctcgccacctgcagatgattgtgagttttgcctgctcgtacgacctctcttccgcctcggtcgctgacccagtattcctccgccaggctgtcggtgcgtcgtccttggctcgatcggacccaatacccccgtccggtgtttgggcctcgaccttccgactctcgtctttgcccgcggtcgagccgagcgactgacccttgctcccgccccttctttttgtccttggctgtgcttccttccggacaggcggttccattggcactgggtgcgttccgccctcctcttgcgttgctgcccgtctcgctggcgactgacgcaccgtctctcctcgctcgtctgcctgcagtctcttcgttggttccggtagcgctctccgcaacggaggcccggctggtatcctcattgcatggatccttatcggagcgatgtgcgtctgctttcgcggcgcctggcggctcgggtgacctgctcctgacatcctacctgctcgtccttttccaggctcatcaacgtcacgcaggccctcggagagatggccatcgtcttccccgtttctggaggtgtgtctccgctcgcgagacggccgttccgctccaagccagcgcctgatccatcctcctcgcgctcgcaggcttctacacgctcaccgagcgtttcctcgacccgtcctttgccttcgccatgggctggaactacgtcctgcagtgggccgtcgtcctgcccctcgagatcaccgtcgccgtcaccaccgtcaagtgcgtggcctactctcgttgctgcctacctgcgcgttcttactgacgtcgggccatctcttcttcttaccctcctccagctactggaacaatggcttgccgactgccgcgtggatcacaatcttctgggccatcatcatgattgtctcgatctttggaacactcggtttcgccgaggaggagtgcgtcctcgcattttcgtctcgcttgcctggccgccgactaacctttcctcaccaaacctaggttcctgagttcgtgcctcaagctcgccgtcgtcatcatgtttatcctcgtcggcattgtctgcatcgtcggcggtggacccgactcgggcgagtacaacacctactccggcggagcactgtgcgtcctctcattttcttctttgctttgagtcggccgtcgctgaccagatctttctctcggcaagttcagctggcaatcgccaggcgcctttgcaaacggcttcaaaggagtctgtgccgtttttgtcaccgccgccttctcgttcgccggaaccgagctcgttggcctggccgcctccgagacgcccaacccgcgcaagacgatgccgagtgccggtcagttgttttttcctcgctgtctgcagcggccggcgacgagaaagccgctgactctccctctcgctttcggcttgcagtcaagaacacgttctggcgtatcacgctcatttacattacttcgctcaccatcatcggtctcctcatcccctacaattactcgcggctgctcggcgcccctgacgccggatcgggctcggctgcctcgccattcgttctcgtcttctcgcgggctaacatccgcggcctcgaccacctcgtcaacgtcaccatctgcatctcggtcctctcgatcggcctctcgtgcgtctacgccggctcgcggaccctgacggccctcgccgagaccggctacgcgcccaagatcttcgcgtacatcgaccgcgccggccggcccctcttctcgacgatcgccattcttgccttcgccccgatcgcttacgtcaactgcgcgccgaacccggacgtcggcggccaggtctttgactggctgctcgcactgtcgggtctctcgaccctcttcacctggctcgccatttgcctctcgcacatccgcttccgcaaggcctggcgcgtccagggccactcgcttgaggagctgcccttcaccgcgtacgtcgtgaaatccagtcaagcctttctccgccctaggacccggctgacactctgtccgtctcccttcacagcgctttcggcgtctggggctcctggttcggcgcgatcctcatcgtcctcgtcctcatcgcccagttctacattgcgctctggcccatcggcggcatgtcgagcgatccgaccgaggtcgccaccggcttcttcaagtcgtacctcgccgccccgatcatgattggattctacgtgcgtttgcccttcataatccttctcttctgacctcatcgactcactccgttgccatttccctccagatcgccggtcttgcctggaagcgccgcctgcctctcaaggcccacgagatcgacctcgacaccggccgtaagtcgtggttgaccgtcgaggagatgcgggcctaccgcgccgagcgggcaatggcgccctggtacaagcgtgtctatcggatcctgttctccaactaggcgagcctgccattcccttctcctagccgcgctctgttcgcggctttatgacaacattacacaccctccttcccctcccctcccctccttctcttctctctctcttcgagttgtaataacggtccgcccctcgtctgggcggccaagatctcatgagcgacgcctacacacaagtccgagatgcatgcaaagccgagcgcggccgtcctcttcatcttgcggccacctgctagcgtatcaagcagacgacttcgactaggatcgacatgactgcagagtcgaccgacccggtccgcaggaggtcatccgacagacagagctgcgatcgtttcggcttcggctctcgtttctcctcactactttcggctagatcctcgcgcaaccggcagaagcgtcatctattatggtcgtccttttcggcatggctccccgatcctctggcgccgttagctgtcggtgggtgcgtcggcgagcgtgtcacgagtcgctttcctggcgcgaaagtccgagaagctgggagcgacagtgcgcctcttgcgtgcgaagcgttactactcgaggctgcccgcaagctgcttcagtcatgcgagaccggcatgagtatggcacggatcatagtgcacttcatagtgcactgttgctgatcgagtagtgcagcagctgctcggccgtcggaaggaatttcgtgttggactcggccggcggtagccgctcggttggagctccactcgctccctccgacgtcgaccagtaccccgccttcctgacaatagcaaaatagcgcagcaagaggtcagcagccctctcgtctcgtcggaggccgaagcagcagtcgactttttcgagccgtcccgatgaggccgcaagattcctgctggcagaaccgacaacctcccggcccgcactcgtcactgccgccctcctcaacctccggccagctcactcaagtagcctcagcagtctcttcgacgtcctccagtcggctccagcagcttcaagtcttgctccgcacctcgcgtcactagcagctcctcgaaacttcgcgcgactcctttgcccaccggccgacccagaactccgccccgcaacccatccctccttcctttggcctgacgacatgaccgtcacctcaagcacgccttcgctcacgatcgtcgaggaggacactcctcggacgggcgatgtcgagaagggtaccccgggtcgctctgctggcgtctggcgcggcaaggtcagtcctccctccctccgtgctcgctggctgctgcgggacgagcttgcagctgacgacctcaacccgacgtcgaccctctcttcgcgcccctgcagaagctcaacagcgtcagcgtcgccgaggcggcgattgccgaggacgtcttcgtcaagaaggagggcggcccagactaccgcgccgtcggttggggcggcgccctcatgctcctcctcaagacccagatcggtctcggtgttctcgctcttccgaacgtcatgatgacgctcggcatcgtcgtacgtccctcagtctacgctatgggacgagctcgggcaccctcgtaccgggctcgtccagccagctctgaatcgccgacacgagacgtcgagcttaacctttatagtcggacctgacccggctgactcggctttctcgtcatccatagccggctctcattgtcctgcttctcctggggttcctgacaacctggggagactatggtgcgtatctgcatcgtccgtcaatcaagccacgtctttggtcgctgatgtgtggcctcgatcgtccgcgcagttctcggccagttccgcgagcgctatcctggcgtccactcggcgcctgacgtcggcttcatcagtacgaccgttatctgcgcgctctgacatcgtgcaatgtttgctgactaacagcgccggcgccttcgttcagtgttcggcacgatgggccgggaactctgtgcgtccgctgtctgcacctcgaccaccgcctaaacccgaccgacactgacgctgcctcatccctctgacctctgacagttggagcggcttacttcgtacggccggacgaggtctctatctgcctcctgccggcgtcgctgacctcgagcgttgccctctacagctcttcttcattttccttgtcgcctccggcatcctctcgtcgagcatctcgttcaacgccatgtctgagcacggcacgtgcaccgtcgtctttgccgtctgcgccgccatcatcgtcgccatcggcgcctcggcccggacgttcaagcagatctcgtgggccggctgggtcggcgtctgcgctatcgtctgcgccatcatgatcgtcgtcattgccgttggaatctcggaccggccgccggctgcgcccccgggcccgttcgacaagcagctccgggcgttcaacaacccgagctttagcgacgccatggtcgccgtcgtcaacgtgtacgtccgcccggcgccccgagtccccctcaacccattcgctgacgaccagtcttcctcaagcctgtttgcctactctggcacgcccggctttttctctgtcatcgccgagatgaaggtcagcagcttctccagtcgatcgggcgtcctgctcttctcactcactgaacccaacgctcctcgcaacagaacccgcgcgactacaacaagtcaatgttcacctgccagagcttctcgatggtcttctacgtcaccgtcagcattgtcatctggttctgtgcgtgtatctgtcctcgctcgctcttttttggcctgatgtcgtcgactgacttgcttgcctttgcttgttcagactgcggccagtatgtcgcctcgcccgcgctcggctcggctggaccgtgagtaccgaatcacctcgctccttcgagaggtttcctcgaaactgaccgccttgccacgcctgcatctcacagtgtcgtcaagaaggtcgcctacggcattgctctccccggcctgcttgcgtcgccaatcgtcaacgcccgtgcgtgcgagcgaactcgaaccagaccgctctcttatcgatacagaggctgacctacgccctccctccctgctcgcagacctggccgtcaagttcatctttgtccggctcctccgcggcacgatccaccttcaggagtcgaccaaaacgcactgggtcacctggctcggcagcgtcgcctttgtcgtcacgtttgccttcatcattgcccaggtcatcccgttcttcgaccaggtgtgtcccttctgcagctcgctcacctgtcgcttcctggtcctcgtcgctgattgccttcccttgatccaaaattcgcagcttatcggcttgattggcgcagttttcgccagtttcttttgcttgaacatgtgcagtatgatgtggttccatcgtacgtctcttccccttcctacatctagtctaactctcgctgacacactgtctttcgatccttagtcaacgacaaccgcgtacgtcccttctccttccttcatctagcctagccctcgctgacacgccgtctttcgtttcacagcgccgcgagggtcgcgccggcatcctcttctggttccagtggctgacggccggcttcatgttcatcggcggcctcttccttctcgtcgccggcttttacggctcggtcgtctcgattcgggacgcattcgacaccggtgccgtcggccgcccgttctcttgtgcgggacacttttcgctgtccgacttaaggctcttttggtcagctgctgaccgccgctctcctttgtgtctctcccgcaggcgccgacaactcgaactcgtcataaatcgagcgccaaccctttctttctttcacaaggcgcctggtttcacaaggcgcttggtgtcctgtctcgcttcagccgctcttcagtggcgccaacccggtcggctctaagagccagtcgtctagaacggtcgtacgacccagccttgatttcgcacgcctccctcacccacccctctaccgtaccccttgtagcgccccccatctgctccccattagaaaaaagtcgctttatcaatagaacgccacttgtagacggccctcggatatttctccttcttcctcggccgctcagctgctgctcttgcacggcaggcgtaacgcaggggacaagggagatcaaatgctcggcttcgtgcttgttctcctgcagtttgcgtccacgccggcgggttatgactgaaggccagcaggaaagggagatagaggaggaagaccgcgcccaagtcgctcaaggggagatgacgagcatccgcattcaagggcgcttcggcgcgtcggtctgacggaggatcgatgagagcatgctctgcgctgcatgaggtcgaggtgtgaacgtcagcttcaagttggtctgggtgacagcttgaacgaagaaactgacgagcggcccctggcttgatgcttacaaccatccgccgcggaaaggcggctttgtcggcgaccaccttgcgctgagcgagatcttcttgcagctgcagcgcgtccatccgacgtcggaaggccagctccgcttcccgttcgtcgagcacaagctggagcggatctttcggcaccgtctctgggccggtgatcttgaggcctgccttccgtaggcgaagaagcgaagtctgctcgcggaggttctcgcccgagtttgcgatcttccaggtgccgcttttccagcgctcgagcatcaggtccgtctggatgcgagcaagccgcgggaggtgagctcgaaatccggagttctctcgactggcggagagcgccaagaggagtcggtgcgtcgtttccggtgactggtcggcgccgaagaggtgcaaagtcttgagctttggtaaggccggaagggcctcgaggtcgatcccttgcggcgagagcgagagcgaccggacgtttggcgcgagcgagaggagcgtgcgcgtgtagctcggggttggacagtctggcccaagatggatggcgaggtgtttgacatgccgaccgaactcgccgctgaggaggagagtgagcgccgggtgcgacgacggcgacagcgcgtaatggtcaatgcgaagagaggtgacgttgtcgagctggtcgtgaacgcgcccgaggaagctgggtgtagcgatagcaggatgattgaggtggagcgacgtgacctgggtgaagttgcggagagagaggtagaggtcggagggcggcccggtgaggatgaccttcgtcggtcgtgctagaacgtcctggtgccgccgggcagtccactgggagaccatcggtccaatcagcgtgagctcctgtattccctcgagcttgatgagagcggagccgagagcggtgaggacgtcggtctcttctttctgacttgcagaagagtggcgcggaggatgatccggaggggtggcgagccgcacggcgagcacgcatgatgccagcctcggttcggccgacaagtgggcgatgcacgaccggatggccgacttgacttctggccggtcgacgctgccgaacgagagctcgcgccagagcagcggctgaaggtaggctgcgggacatcgagggcaggttaggtccagacggcctgagctcagcggttgaggtgagcacgcaccatgccagtcttgagcgacgagcgaacatctctggagtgtgcgtgcgagctgcctagccgcttcgaggtcgagagtcggatctctgaagcgagcccgctcggtgcaggccagcaagatctgctcaagtacatcccagggcaaggtgacgggcggcctgcgaggagagcgtcgagtcaaggccggctgcgtcagtatgcctgccggggcggcggccaggcgcactgcttggacggaccggctattaggacccaagagctgtcgctccggctgaggagctgtcatgtcgagcgcagtgaggctgagggcgggcggggcaagagatgaaggcgtcggacggaagaggaggcgcgagcgcgacgggtgccagccggaaaacagatggccagagcgtggggcgagactgaggcgagagcgaggactcaagtcgcaccgtgcaagctgtgacaggggaggacgagagatgttgatggtagtcggtgttgaaggtgtagcgagaggcatcccacgtccttcccttcgtcggtcgaagagttcggctccgaagcagggcgcagcacgaggccgaagcgaagatgctctctcgagagacccaatagcacgcccggctcagccgccgaggtcagaatcgtctacagagagcaggcgtccatcccatctagcattatcgatctatcgcgccaagtgggaagtgaggtccctaggccgccgccgggacgccctcgggcgcggcgctgacagtgtacgtttcgtcgagacgctgcttgatgtagtcgcccgctctgcacgtggagcgcgagagaaggtgtcagcctggtcactcatgaagagcgaagaagccatacgggacgacgcacgaaacgtcgggatagcgttgtggccggtcggccgagatgcagctcgggtatgtctgccgggccgagtgcaaggcgtcaattgatctgctggatgggccgaggcgaagggtccacagagacttctcaaagggatgtacggaccttgatgatctgctcaacgtcctcgcctggagaagcacaatctaagggtcagttccgccttgctgcaaaggcaactcgaatccacgcaccaaagaagaagggaatcgagtagcgtgtccggccagaccggttgatcgccctatggcgcgtcgagacaaagacgtcgtctagaggcagcggcggtcagcgagtgcctcgagcaacgagaggcccgcggacccgtgcgtcacactctgagtcagcagctctgggtgcgagaggtacgcactcgacgcccgcatcattgcgtcggcaatgttgatgacaaaggtcccctcaatcggcggggcgtcgatccacttgccagagcggttgaggacctggagcgcctggacgcccatctgctgccgcaggatggtgaagcacctgtcgtaaccaccagagatggacgtgatttagtgtaggctggtaagacgcggctcgtggcggcctgccacgtactcgtctgcagaagaagcaaagagcaggacagacgtcagctcgaactcgccagcgtctcgcctcattgaataagatggggacctacagtccgagtgagcgccgatacccatgacacggtcgtcgacgacgcccgtctggggcgggtagtgcagcagtcgcgcggcagcactcgacccctgtgccgtcctttctgtaaaatgttcacggggcaaatcaagcgcgagcgcaaagagcgggaagagcgtctcgcgcccgagcttgaagaccgcctgatagtaggcgagggcgtcctcccggaggccggcgagctggccggcgccgagggtaagctcgtccggccagaggttgccgctgacgaggcctcgggcgtcgggcgtcgcggggacgaacgggcccggctgctcgaagccgaagtcaagagcctcgtgcctgccagatggattggacgcttcagtgaccggcgaggttcactctcgagaaggctacgcacaggtcgccccgattggccgggctgcgaatcgcatgtagttggaaagctgatcagttgcttgagcctgagacaacagccagcgacatctggcctcactcgacattctccgacatcaggcccatgtagcccttgtaggcgttcgacttagacatgtgcatctggccgaagaaaagatcgagccggtcgtcaggaacggggggactgcgcgcgctggctggcccgagggaccgaccgtcatcttctccgcctcgctcagctttgtgaagaaagtctcggcctggccaaagacgcgatcgacgagctcctcggggaccgagtggttcttgactgaggaggtggggcaagatcgatgttgccgatggcgagatggcgaccaatggcagtgtgagcgataaggcgagcgagaaggaggatacgagcaaagagccgtgcaaggaaggaaaggacaggaggagggtgggtcagctctgactgctcggactaggctaggagacctttgtcgtgccgagctctgaaggccagctctgctgtacgctcgtctcgacgtgctcgtgcagcctcagccgcagccgaccgagaaagagaaaaggacggactgtagaagaagccctggacgaggcaggcttcccggacttgtcggacgagctcctcctcgggcagcgacaggtcgctatgagggaagcaggagggcgggcaggcgaggacagggcaacagggtcagctcggagaggcagccgacgggcaagctaatcggcgacggcaccgaggcagacgactccacggacatgatgggaatcgaatcgaactcctttggtccgagctcggccgcgcgttcgaggatcggctggagaggcatggctaaggttcaaagagtggaggatgacggtcaggggggagccgaacaggcgggccggccgggcgcagaaaggggcccgagctttgcccgacgcgttgcgcgaggctcgacgcgcccaagccgtaagatgagagaggaggccatcgacgaccagcagcagcaacgacggcctgcattgacagcactcgacgactagcccgactcgccaggaccatatcctcgcccgccgccatgtcggccacgctgcacaataagctttttctccagtcgctcctcacccgaccctcgctcccgctcccgcaggcgctcgccctcttctcagcgacggctctcgccgcccacaacttcgacgcggacctgccaggcccgccgctcaaggcagcgcgcgacacgcggtggaacgagtttcggcacgagatcaacggccagctcgagccgctcgggctcgaggtccggcaggtcattgatgagggcgacaagggccgctgggtcgtcctcgtacgtccacctccgactccttgctctgaaagctcgagtggctcccctgacgctcctgacctcatgctgacgggcgtctacttgtgccctgctctttcgctgtccaggtcaacacagaggcggatgagctcgcgcccttcgcgaccgtctacacgccgctcgaggttgcgtacctcaagacactcgtccgtcccacctgatcggctcggcctaggccatccttcgagcgtcagctgctaacccaagttcgcttctgctcttctctccattgtcatcccggtcggtcgccctgcctgcctcggaaactcgctaatatccgttgacgcgacgccacgcactgaccctctgctcgcaacagatccgcgccatcatcctcgcaccctcttacacgttctcaatcacccgcctgacagcctcccggctagccagccatctgcctaaccacccgtcatcgagcctgacgcgtgccggcgccgaggcccttgtcgagcgcttcatcgctggaggctggctcgaggtctcgaagtgcgtgcccttgaccaaagcgctccctgcggatcgcatcgcggtcgctgacttctcacccgctcctgctcacaggcacaaaaagagactctcactcgcctgccggtcgacggccgagctcgagggctacctcgagaaggagttcccgcctgggatcgacgacgatgaggacgaggacgatggacggccacgaatcctcaagtgcagcgtctgcaaggcgattgccacgaaagtgcgtttctgtagacgtcacgggccgaccttgaacgcgctcgctgacctccgcctcttgccgtcggtgcaatcgcagggcaagctctgcccgtcatgtccgatcgaccagccaacggcggtccacaaccactgcctacacaagctcctccaccgcgcgtcggcagccacgagcgggagccgtggcgcccggcacgtgcactgcccggcccagggcgagggcgtcatctggtccgaggatggcgtcgctgtcgatggcgagctcgaggtcagctggaccgagctcggcgaggaggccgcgggcgagcgcgacgaggcgtacgtcccgcccagcaatggcggccggtcgcagaaggcgtcgagcagccggagcaagggcaagggcaagggcaagcggactcggacggagagcgacctcgagagcgaggacgacgacgacgacggagacagcgaggcggcccgctcgaaggacacccggcagtcgtcaaggataagcaagagctcgagcccagtcaagaaggctgtcaagggtgccaagcgtgagtctgctctgctcttccgtcattctcgaatccggccggcgagaagatgagctgacccgcatcttcaccgatccaggtcctgtcaagggccagtcgggcaagaagaaggctcgcgtctcgtctgatgaggacgaaaacgaggtagacgaggacgaggacgactcggatgcctgactgcctctgtcgtcctcttgcgcgcgcactcgctcgaacaatcctccctcgggcgtcgtttcctggcctccccatccgcgcaggccgcgcatccatccatgcctaccctttctctctcctgcggcagatcgacgccgaggacgtgctcgccacgccaggctgcggccatgggtggccggcgctcgagcttctgggttcgtgggacagagacgccgacgcgcgcctcgacatgagcggccgaggaccgtcgacgcatgcgcgcgttctcccgggcatcgattgttctgctgcgtgacgagctcgggggtgtacgagggcctgcacagtcattcgcccggggcttctggcgagcgagcgtccatggcgaaacaggcggcaaaggggccccagcctgagctgcggccgagcgctggagctccctcggccggagactttggccgactcacctgctgcccttgtcgccgctgcctccactttgcactggaccagacgccgggagcgggcgctgctgtagcctgcctgcaggtcgtcgtctcacctccttcgaacagctcgcagcacagctcgtcggtacacgtcgtccgaacgcgattgctccagtcagtttgaatccctgatcctggctctcgggatctatcgcgggtggcgggactgaccttggcggtcggccatcagatattcggccgcagtctcagcaggtggcgttctgggctccctgcggagcagcgcccgtcagcagagggagcaaacagggcgggacaggtagaaaagctggccgatctgattacccttttcttcccctctctctccctaccaccatccctgaccagacctgctgctgctggtgagtgcgatccgcttcttctgctcgttctgcaaggtgctcgggcgaagggcgaccggcgagcccaagcagccttgctgcagccccgtcggcgagctccgccgatcccccgtccatccgagagacctcagcccacccgcctctccgacccaccttcccaccccctttccttgcacacatccggcccctcgaagggagcgcaagatgaaagtcgttgctgaccccgtttccccctcctttgccttgttcggtcgtcgatcgcccgcctacagcctgccatgagtgacattagctcctccgaccacgcgcactcgcacaagacggcggtcgtccacccgactaacgacgaagagaagacggttgacggcaagcatgcccgcgaagagttcaacggcgggtccgagctcgagtacgacgtccacgacgccgagctctcgggcggcgtcgccaaggttgaggtgcgtcgacctccctagctctcggcccctttcgcacgggccatctgctccctctctcgtgtttggcctcgaggctgaccggagccgctcctcgctcttactctgcgcaggctgcgtcgatgctgctcggccgcaagggtcgcatcgtcatgtggattgctcgtgcgtctctcgcccgccaccgacctcgttccgcagtcgctgaccgcgagcgcgtcgactccaacctcagtcgccttggccgtctacatctactcgctcgacggcacaacgacctacctctacctcgcaaaggcaacatcagtcgtcttcaagcactcgctcctcggcacaatctcgaccgccggcgctatcatcatcgccgtcggcaagcccttgatggccaagctggccgactacatcggccgtggcgagacatacatcgtcgtcacaattttctacgttgtcggatatattttatatgctacggccaacgatgcccctcaaatcgctggtggccaaatcatctacagctttggtacgtgtcccctccgcctttgcttcgaagcggactgagctaatggttcccctgccgtgagaaggttacaccggacttcaactcctcacccaggtcgttctggccgacacgacgacacttcagtaccgtggtctcgccgccggtgccgtcacgatgcccttcgtcatcaacgcctttgtcgcagccgagatcgccaacaagattctcggcgatgttacagacaccaccagctggcgctggggctacggttcgtcgcagctgctcttctcgctttttcttacaccgacggctgacaccatgctcatctcttttaggcatgttcgcgatcatggttcccgtctgcctgacgccgatcatcgtcaccctcctttggggccagcacaaggcacgcaaggccgctctactcgctcaggcgcacaaccctgctcctcgcgtccgcttttcgctcaagtggctcggcagcacggtcctccactttgtgcaggagtgcgacgcggtcggtctcatcctcatcgcggccgcgcttgcccttatcctcctcccgctcggcctcgcaaagttgtcggtgcgcggctggaagacgccgtcgatgatcgtcatgatcgtcatcggctgcgtcgtcgccctaccggccttcatcatctgggagctcttccttgccgagcggtttggcgtcattcccatcgccccaagtgcgtcttctttctgcagcctcttcttctcggcccgcccctgacccttttttttacctacctttcagagcgcttcttcaagaaccgtaacatctcggccgcctgcgcgatcggcttctgtgactttgtctcgttctacctccagtacgtcgggcgaactgcagcggtttcgcctcctccgctgacctcgactcgccctctccaggtacacctaccagtactccttcatcactgtcgtcaagacagattggagccagcggtacatcaggtacgtgcctggtgctgcctgcgagaagcagacggaaactgaaacctctggccctactttagctacttcgcctacacccagacgatcgccctttgcgtctttggcctgctcgccggcatcgtcatggcctacaccaagcgccttaagctcctgcttgttgtcggcctgtgcatccgtctgatcggcgtcggcatcatgatccactccaagggagcgctcgggagtgacgccgagctcgtcatggcccaggttcttcaaggtctgggtggcggattcgctgccatcatcatccagacggccgcccagtctcgcgtcgcacacgtcgatgtcgcgatcgtcaccgccctcgtccttctcatcaccgaggtcggcaactcgtacgtgcctcgggccattccatcttcactcacccgtcctcgtccgctgccgctgacagctctccatcttcatctggcagtgttggctctgctgtcgcgaccgccgtctggtcgaaccagatgccccaggccctcgctcgctacgttcaaaccgacaatgcgacgctcctgaccgagctctacagctctatctatgtcatcgccgcatacccggctgcagacccggtccggaccggcgctatcgaggcctacggccacgtcatgaaggtgcgcgccaccctttgtgcgctccgtcgcgcgagaattttgctgaccttcatgacctcgcttcgttttgccagaacctctgcatcggtgccaccgtcgtcgccatctttccgccgatcatcgcctacttcttcagtgagttccgttgcctgctcggacatgatgaaggctaggatgctgatgcctgtcaccttctgcccgccctcagtcgacgacgtcgtcctcgacgaccgccagaacgcgctcgacaaccgcggccttgacggcaagcaccgcgaggccgacacgacgatggagtcggccaacgccttcacgtcgtcgacctcgcgcctccgcaagatcttccatctctgaactgttccttcctctttggtcattctccctaatcttctccaatgacgatgccagtctgacgtttgaagagagaaggacactcatgcggatccgtgcaaggccgtcacatgatgctgcactcgttcttggcctgctcgcgtgtcggccgcgcgcccttgccactcttgttgtgatttttgagctccagcaggcgttgcatggccctgcgaggcgcgaagcgggtcgggcgacagtcagcgacatccaaggctagagcgcggcctgagagccgacgtaccgcttgttccgctgcgcagccgcgcgcatgtaccagcgcttggccgtctcgaggtcggcctgcgtgccaatcccttgctcggtgtagtctgaggggcagcgcaggagtgtcgagaggtcagcgctggtgcaagctgagggtcgctgcaggcaagtcgactcacaaccgaccgcgtattctgccttggccatgcccttgttggccgccttgcgcgcccaaagatacgattccgagtcagactgcttcaggacaccctctgctcagcgacgaagcaagagcgagttgggtcagccggcggcctttctcgcgagaagatgggaggagacgaaccgcttccggtcaggtaccagccgctgagggcgagctcggcctcggcgttgcccttttcggccgccttggtgtaccaggcgatgctccgtcgcgggtcgacctggcacgtcaggttaccgtactcatagcacgtcccgagcttgagctggctcggcgcgtagccgagctgggcggcttgggtgtagaactcgcgggcccactcgtgattcatctcgacaaactgcgcggcggccgccggcgggttctcgtgcaacgtcccgagctcgtgcagcgcatgcgggttcgtctcgtcggcttgggccgcggctttccggagccagtggatgccctcgcggacgttagccggctggccgagcttgccctcgagcaacaccatcccgagccggtacatggccgtcgtgtcgccgagcgaggccgccttacggaagaataggatcgcgcggttgagctccttgcgcgtaccggcgccgagctcgttgcagacggccgtccggtagcaggccgccgggtggttctgcttggacgcctggaggtagagcccgtaggccttctctgggtccgactggaggccgaggccgccggtgccgtagaggtcggcgaggaaaaactgagcgtcggcgagcggctcgtccgactgggtcgcaagcttcttgacgagcttgagcgactcgcccaggagcgcgtcgcggtacttgcgacccgactttgcgtcgtgctggccgacctcctcgccgagctttttggccgcctcgatcaggtattttgcgaacgcgaactgagcctctggatctgggtcgcccttcattcgcgtccggtactcgtcgacgaaagccttagtgtatggcggcttgcgagcgtcgaccgtcgcgagcgagccttgccgtttggcattcgacgagccgatcgacgtgcccgagcgggcgaggttcgaccctgccgaggccgaggtcgacgaccggccgagcgaggcgcccgagacggacgagacggaagagatgttgcgcgagaggttgggattgcgcgagggcccggccgcgccttgcgggatgggaggcataggcgggtagggccgtgagggtcccggagggtgcccgccgccgcccatcgccggcgggtagccgaggacgcccgaggcggcggcgtagtaaggattcgagtagtcgggctgctgaggcggcgggtggtactgcgtcggcggcgggccataatgagatggcggctgctggacccagccgccctgctgctggccgtcgccatagatcgacgactgcctgctctgcggatacggctgctggtaatgcacgccgccgccaccctcggcgtaaccattcggcccgccgccgccaccgccgcccatgtcgaggctcctgacgctcggagctgcgcccgtgctcagacggctgtagccgtttgacggtggcgggccagagcgctgcgacatggacgtgttgggcctcgggaaggggtccgagatgcgcatggcgctgaagccgccgccgaggtcgaccgagaggtccggcgagggcgctgctgccgctgcgtcgtacgacggcagtggcggcggcgaggtcgacgggtggtccggcagcggatcacggccggccggctgatcccagggctgcggcgacggtcgctccatccgccgtcaaagaaaggaggaggaaaggaaggagggatggatcaaggtgcttgcgggttccgctgccgagaccgtgtggcgagctgagtaacccgagagctgcagacgtggctttgctgattgcgtgcagacgagagaatgtggacgagctggaccgaggacagggttacagagaaggcgagtcgggccttgggtcgtgctgatggtcgggtcgactggagaaggcccgtcttgctctcgcgcgcgcgcggcggcggcgtccttctcctgcgtctcgatcgcctgccgggccacttactctcgtcgtgcgacaggccgaccgtctttcgttccttgccttctgactaaggtgccttttgactaaggcaatgcttgaagcccgacgcgctgtgaatgtcggccgcagagcagcacgccgcagactcaaaaagagcgcttgagagaggcatctaaagtacatggtagtgcgacggacgacaaggtttgtgagagagtgaaggaagggcgtgcagcggcgcgagagcacacggccggcaatacaagcggtgagggaaggaccaaagggagagaagagtacatgtcgaaaacgcgcgcaggagaggtcggagggagtgtgagccgggttgcgagcccggcgccggtgtcaaaggagagagcaggcgacgaccggcctccccttcgaacgcctgccagttttttaggttgcccatctagactgagttcgagttgtcggcgcacgtccaaggactgctgccctcggccttgatgaggtccatcacggctccgtacgtgccgccgacggtgaagaagcagccggtgacgaagatgaggaccgcccaggcgaggtggagccggaagccccaggacttgtcggtagcccaacgagcacggttgtcgtggatccagatctgcgccatgaactgcatggacagcggcgtggcgaagagggcaccgataaggccgacgagacctggcagaaaccaagaggaagaagggtcagccaagccgggcgggaggccgtcattcaaacgggctcgtgtcgacgcacctccgaaaacagggacggccgaggcaatgacgtaggagaagaggatgcaggcagcacagcacgagagccagccgacccagtgcttaaacgagttgtcggtgagggcggcctttccgcggaagagccggacgaaaatgtacttggcgctcatatgcgagtagatctgtgatgtcgagggcaggtcagctgtctggctcgagagtgcagggaagagagacgcaggtgagacgtacgcagacagtggcaaagagggcgggcatggcgataccataggcaatgcgcttgaggagcgggccggccgagccgagcgccggattggcgacgtactggccacagaaggtgtagacgacgacgccgacgatcgtgtagacgagcgtgacgacgatctggcagagacccatcgccttgttgtagtcgcgcgggttgcgcatctcggcaatgaccgggtagaaggcgggcgtgccggcaaaggcgaggacgacggtcgcgatcgcgttcatcgcctgggcgaacgtcggactgccgacggcgacgacgatgaggtcccactcgccgaactgaggcgcctcggccgggcggtcctgaagaccgacggcgatcgtgacggtgccgactgcaagtgaagacgggactgtcagcctcgggcgcgccgctttgacaagaggacctgaagacgtacgagcagagataactgagaccatgcctacccagcccagccagctgaccttgtcgagcgtctggatcgaggcgagcgcaaatccaatgacagcgacgatggcgacccagccggcggtgcagagagcgtggaccgagacagcgttgagcgagattgagagcgaaagaagaccggagccggcaagcagagcaaagtagagccaggcctgaaaggaagaggcaagtcttatgagcgcctgtcgtcaggtgagaagagagcagcacacgggtcgtaccatggcaccgaagatctcacggccgatagcgccgtggaggacctggccgacctcggacgggccccaaatctgcgggtggttgcgcttggaggtgccgacgacccagtcagaccctgtttacagacgcgaagagaggaatggtcaggagcaggttgacgacggagagggagaggagacgcacaggtggtcatggcgccgacgacgatgatgctggcgagtgaagggagatcaagtcagctgaagcaaatgaagggcttgtgactgcactgggacgcacacaatcaagcccggaacgagaccgagggcctggaagaccgagggaatggcaagagcgccgaggccgatctctgtgagagcaagcagtgggagaggaaatcagtaggagcggactaagagaggtcaagcgcccggcggcaagcagaagcgccggggtcgtcggggcagcaaaggaggtttacgtacgcgtcttcatcaggagaaccgaggtgccgatccagccgacctgaaggagtaggcatagcaggcaagctcgtcagagggaagatactcgcaaagaggcgagaggggaggacaaacgttacggtacttcgctccctcgccctccttcaggaggccgaatacggcgtcgtggacctcgccgtccttgacatcctgggcctcgagacccttgtgcgggacgccgaccttctcgatggcgtcgacgtcttcgaccgaattagaggcgttggtgtgcatgctgggcgagagctagctcggggtattggtgaggatgagagtggtgtcgaagggagagtcgcgtgaaggagagggcgacggggtcttgctgaggtcgagcgtcgagcttgagggtagcgaggccggttgaagtagcgaacgagcgggcgcgagggaggaggagagaaaggagagggaggaagctctgctgctgttggtcgagcgaagtcgaaggaggcgtgagtggtctagccgggggaaggggagggtgagggtatggggccaggagagcaagaggcagccccgccctcttgaaggcgggccctcgccctcgttcttgaaatcagcgaggcgacacgaggcggtccaatttgcccttgacaggcgtccgtcgtcttggccttggtcgggcgcgaaaggggtaaaagggcagcttaccgccctagcaaaaacgaaggcgagacgggtcacctgcgcggcaggatctggagaccccgccggagccgaacggccgccgcgcgggcggctgagtgcagcgccggcctcctatgcacgcttgcgcctgcgggccctgctgctcgctctcgtcctgccgccgacagcctgcctgcaagccagctggtctcccggctcgcggcctaccctctagccgtcgatctcggccgggctgagcgggccagaagagcagcaacgcccggccacgagggttctcttgacaaagtcagcgtgacgctgcagacgggcggaccgagaggctttctgcgcagctgacttcgtcgctgctgtggctttgggcgagcgagcatgcataaagcttgcggctggccttctgggcgggccgcggcgaaaggataatttacagtacagcgagtgggatgcgagctacaatgtgtgttgtgagagactggacgacgagcgtctttaaaggtatgcaaggggtttgagcagtcgagaaaagaacggtaaattacgtcgaggccgagttgtcggcgcacgagaacggccggccgacgttgccggtggcaaaagcgtccttgatcgagacgaccgaggcgtagaagccggcgacgaggaggaagaggcccgcgacgaacatgaaggcggcgaggctgtactcgacccagtaaatggcgttcgtccggccctcgcgacgctgcgagagaaggggatgttagtcgaatgtggtgggagagtatcgcaggctaggcgacgtaccttgtggttattctggaagatccacatcatagcgacaaggactaagcagaaaaagctagcgaaaatggcgccaatcaagccgataagctgcgaattttggatcaggggaaggcaatcagcgacgaggaccaggaagcgacaggtgagcgagctgcagaagggacacacctggtcgaagaaggggatgacctgagcgatgatgaaggcgagcgcgacgacaaacgagacgctcgagatccaggtgacccagtgcgtcttggtcgactcctggaggtgaatcgtgccgcggaggagccggacaaagatgaatttgacggcaaggtctggcgaggcgaaggcaagctcgtcagcttctgctctcaagtgtcgacggggagcaactggcactcacgagaatagatgatagggccggcgagcaggccgggcagggcgatgccgtaggcgatcttcttgatgacactgtaaagaggcggcggctccatcagcaacaggcatgaggtttcgagaggaagtgcgcagaacgtacggtccggccgagccgagggcaggagaggcaacgtactggccgcagtctgggagagtcaaaacaagatgagccggggcttctccgattcgctcggcggcggtgcgaggtcactcacagtaccagaggacgacgccgactgtggtgtagaaggcgatgcagaagccctggcagaggaacatagaccggtaataatgccgaggctccttcatctcggcgatgacagagaagaagccgggggtgccgcagtaggcgaagaggctgtcgaaaggacgtgggcaacatcagcgacgagctcttgcagaaggtgagaagcgcgagacgtacacgttaacgacagcgaccatgccgtcggtgaaggtcgggttgttgaacgcccggagctgcttgtcgaacgggcccgggggcgcagccggcggccggtccgagatgccacaggcgatgacaacgatgaggatactcgggacaacggcgcagatgcctgcccagccgagccacgagatctgcttgaacgtccgggccgaggcgccgacgccaatgatgacggtggcgacgacagcaaagacgacggtgcacgtgccgtgctccgacatggcgttgaacgagatgctcgaggcgaggatgccggacgaggcgaggaaaatcatgaacagctgcagagcagaagaggagaaagggttagtcccacgacggcggtagaagtcagcgctgagactcacgaagtagccgaagccaacagactcgcggccccacttgcctcccactgcaaagattgaatgctcgttagtcgcttgccggccggacagacaacatttgaatggggggacgcactgatgaagccgacgtcgccgacagagtgcacgcccgggtactgctcgcggaacttgccgagggctgcgtgacagacgggtcagcgttgttcgagcatgatgcggaggctgcgctactcactgtagtctccgtaagtggtgatcaagccgaggatcaggatctgttgcagacaagggccaaaggaggacgtcagctgctcgttccatcttaggctagattgaccgctgcgcgaaggggctgctcgacacgcacgacgaggagacccggctgaagagcaggttcgtcagcgcacgaaactatcaaagtgacaggcgaacaagccacgcacgacaatgccgagcgtcatcaggacgttcgggagggcgaggactccaagaccaatctgggtcttaaggaggaggacgagggcgccgatccagccgacggcccgatagtcgggtccgccctccttcttcacaaagacgtcctcgacgatggccgcctcggcgacgctgacgctgttgagcttctgcgaaaggtacaaagcaatgacaggagtaggcggtcagctgggctgaacggccgctcgccaaggattccgagtggagcgcgcgcgctcgcgcacctttccatgccagacgccggctccgacgccgttggcgtggttgaggtgggacgcgctgcccttctcgagatcccctcgaggcaggtcctcctgctcgtgcgtgagcggcggcgtgttggcgatagtcatctgagggtcggagagtcgccttcgagagggtatgtgaaggaggatgggtagggttgaagtcgagccggtaggctgagtgtgcctggaaggctggcttcgaggagggcgcgaggttgcttgaggtgctcagggagagcgaaggtgggtgatggttcggagagaaggagcgactgctgcttgtcccgagctattgaggagtaaaggaggggttcggcggccaaagggacgtagggttgatggggccctgcctgtcatgacggcgggtagaggtcgtcgcagtcggaggttaaacggcagcttggccggctgcgcaggcctcgagcccgcttcgtccgcctgacccgcggggctaagacccgcccacacgaatcgaccttccggcggcagcgcgtcaaccagcactgctctctgctttgaacacgcgagggcggcgaagaaatggccgcctacccgtcgccttcgagcccctctcgggcgcctcgggttggagctcggaccgggtcgtctgcccgacggcgacgaagcccgcccgccgcagctgacaaagcaccctcgtcccggtcgcgacgtcgggcggcggcaatcttgatcgggacaaggaaagagaaagcgcatggcaatgggtcgcgtaacgcggcacagccagcgggcgtgtaacggggaggggtgtcgtgtgagtcgtaaagggagggcgggcgttaagagggaggtagggctcgtcctcagcgcgcgatgcgtcgctggacgtcggtgtgaaggaagttatacgcgagggcggcctgctcgctgcccatgatcttagaccggcagagaaggacagaaggaaggtcaggcattggacgcaatcgaagtgtcggcgcagacgcgccttggccagctcgtccttcgagagcgagcacatgtgcttgaccgagtcgaaattattcatgacgtgccgtagattgcgggccgactgtcgagcaggaagacggctagaagtcagcgctgcagtctactggttcgcaatcagcaggacgtgcggaacgcacgacgccgggaatcagacggaggagctcgacagcggcgccgttgctgccgctcacgtcgccctcggtgccttcgtcgccctggccgacaagaatcgccttctcgacactcggctcagcgtggttgagcttgaggtcggcgacgatatcggccgtcgcgagcggcgacgacgaccaaatgatgcgcagccgcgggaacgtcagcgtcaggaggacgagcttcgattggatctcgtgctccgagatggtgtcctcgggcggggtcgcgtccttcttgttctgaaagtgcgtcggccgcttcgtctcgatcatcgactgcgcgagagaggcagcagcatcagtcgcaggtcgaccgaaggaccagcagcagccctactcacctgtagcgaaaacgacttattctcctcgaactcaatcaggaggatcggttgcttgtagtggacgctcatcgactcgcactgtgtgtacctggagcgattcgaaggcaggatcagcaccagggccatcagcaccagggccatcagcaccagggccagtctgattgcgggcagagaggcggcgggcacttggactcacaggcggccagaggcgaaactctggattaagtcggggatgctcttgcgctcgacgcacatctcgggcgaaaggatgtagtcgccgacctggagcgttaccggaataatgagcatgcccgacgcgtgcaggattgacggcagcgtcgatcggaactctcgcatgtcaacgatgacctgcgccaaggaagcaggtcagcttggataacaacttgagccagcccgatgacctggagacgcaccgtagctggctctgcctgctggtcgggagcgccgccggccatccgcgtgctgatagcccgagcgagagtgtcgaccttgctcgtcggcgcagacggcgcaccgcgcgggtcgcccgaaagcgggatgatcattttctgtagcgccggaggaacgtcagatcattctctctgactcatcagcgggagggaactcgtacgcacgcccttctcgcggatcagccgctcgaacgcctgcttctccttgcgcatgccggcgaggtacttttgctcctcgaccgactccacgtagagcataaagtagacgcggacggcgaggcccgggttcgagctccgatagacctggcaggaggacgtcgcacagaggttaacgcggtttcccagaaggtcccaggcggcagtcgcgcacctcaatacggcgaatgaaggccgggtccgggtcgtacatgacgataaaacgcggccgaagctcttcgaggatctggtcctcgtcttcgcctttgtacggccggacgacgatcgtgtcctgcggctcgagcaggccatagaacgagtcgaagccgtctgggtcaaagaagtcggtgcccgagtcctgggctgacggccggatgagcgtctgaggggccggcgcgcgcgacgactggctctcggccatcaatggcgcctcagagggcatccgctggagctcgggtacctcagactcggcccgggcgaggccggccgaggatggaccgggctgcgtgcttgccatcgagggttcgcggaagaagaccggagccggcgtggccgactgcgctaccgacgaggctcggcctgtgccatcgtcgccctcgtcctcaagcagctgctgcgacgcctcgtgaaggctgtgacggcggacgagggttatcagcgatggcgggagtaacagacagaggatggcgacgcacaagtttgcgatgtcctcggcttcgtcctcgaggccctcctcccgagcctcgcccgactccttgacgtcgtcctcgcggccgcgcgagctgctgacattgccgacgacgctcccgccccggacgcgccggcgcttgtaggccggctggcctcgcggagcctggccgccccgaccctgcccgttggccgtcgcactgttgttggcgtcgttccgaggccgggcgccaccgccgcgaaagttgcgcgtcatctcgccgaggctgcccttccagtagaagtaggagcgcaggacgcgctccatcatgttctggccggccgtctggctagggccgtccgagtcgggaggccggcgagggtcgcggctcgcgagatactcgcgcagctgcgtgcaggtccgctccgacgaggccatgacgaggatcgtgttgctgccgggcgcgtctaagagcgaagggggggggggggggttcagccggaggtagcagtgatgaaattaaaatctcaccgacgtaccctcgatgccttgccgctcgagcgactcgatctcctcctcaatctcctcgagcactccggccagcaggccccattttggcagctcctcgagcaccggctcgacgcccggcggccagcgactcgcgcccaggaccgaagcccgggcatcggccgtctcaatctccctcaacgcctcgaggtcatcttcgctgccgtcgacggccgcctgcgcgtcggcgttggcctgctgcatcgccgtcttcttgctcttggacggcggcggcaggtaagctcgccgcttggcgacgtggaagagcgtgttggccgcgtcgaggtagagccaaggcgattgatcgggccggttcttggccccttggccagagacggccgaggagcccgtcatcgaggccgacgcggtcagaatcgattcgagataggagttgtacgtgatcgagtcgtaggtgaggagatagctgcccgagcggagcacaagtcagaggtcgtcaggctgggtctccttgtaaattctggcggcgcggcgagaggtgagactgactcgagcaggttgcgcagcgtcgtcaggtcttggacgagccgcttcgtcttgggcccgacacggtgccagatcgggtcgagccggccccggacgacgcggtcgaaatttcgaaagagagcgttctcgaccgtgagctcatcgagctcgacctgcaggaggatggtagcaagcatgtcagaggatgagcgccacaagccgagcgggcttcggccggacgcacgccggtgcacgacttgcgtagctccgccagcgtcgcgtccatgcactcgacgatggcgacctggatctcgctcatcttgcgcgtgagaggctggtagagctcgatgacgtctgccttgcgctggccaaggctggcgtgcacctcctcacggtacctgatgagtgacgaggccggatgagggtcggccgaggtcaggcgaggctcacgagctgcgagggtaggctgccaggcacgtaccgcggccagagggtgacgcgccggatcgagagctgcttgagacaggtcgtcagggggttcatcgtagacgtgaatgactcgggttcgtctgagaacgccttgaggaagccctcctgcagttatgtcggccgggaatcagcatagcgtgagagcacaagtgagcgtcgaagacgtacgtgattcgactgccggtatagacggacgatgaaggcctcgagactcgtttggttgaccctacaagacgaggcggcgcgagctggacgtcagcggaacagggtgtcttctgcgcgaacgcgaaccccggcaccgacgcactgctcggcatggaggaccatcaggccggtgatcatctcaggcggcacgttcttagtgaggagatcgacgaccaggatccgcgacgtgaccgagaagaggccaccttgaaggtagagagcgttcctgacaaaaggaggccatgccgggacgtcagctcgtgggccttccgctggtggcgatgctggagcaagtgaggttggacggaccgctctttcgagcccatctcgtacgtgagcacccgaagacccggacgtcggactccgagcgtcgaaagcagctcgccgatgccagcctcctcggcgggcgtcgcgttgacctgtgtcgaaggagtaggcagacgcacaggccgcagcgcgccgaacgtcagctcctggccgaactcctgagctctggagccgcagagaggtgctaaggcgaatgcaccagcaggatgagattgtgctccgagtcgtagatcttcatcatcgtgcacaagatcttgcggagaccgaggcccttggcgaggataaggaggtcgtcgtgctcgggcggggcaatctcctcgatgatctgccggtggaacgacagcagcggcgccatctcgggcaaaacggcgttcgacggcgacggcctctgatcgagctgagagcgaggcagcaagcgctgggtgaagcgaggggatggaagatgaaggtagaggacgacgcgctcgagcaaggagcagcaggccgagcctccgcgcgggcgcgtcatgagttcggccgactgactcgaggtccacttgtgcgccctcacgcatccgatctcaaaaaagcagagctgcgggcaggataggagccatcgtgatctaggagggcatctctacggtgcccatcggccgcgcttgttcccaccccggcgtccgcgcacgtcacatcccggccgacgactcaagggcagcagcatccgctctgccggtctctaggcgatgacgtccgacgtagccaccttggtctcctctggatgcagcgccggtgcgtgatagacggcgcccttggtcccgaggagctcgcggacgcccgagccgtcgagcatcgacgcccacttgggctcgacgtagatcgccctggttccaatcaagatcagccgtcagcacgcgctttccactcgtcaacttgagcgacaggacgtactttgcatcggcgagcgtctcgccagcgagggtcatcatctcggccccgacgacgaccttgcggcccttcttctcgagcagcttagtccggattacgacccactggtcggcccttgtcggcagccggtagttaatgttgaggttggctgaaggagagagtgagagctggcgtcaggcaagtgcaacaaccgcctcgctcgccgcagaaagacgtacccgtgacgccgatgttcgtcggcaggttgaggagggcctgagagaagcgcgagtaagcgggaggaagagacgcgtcagccgacaggccgaggagaacacagagatgacactcctccagctcacattacggcctgtcgcctcgtcgaggaccacgccgaccatgccgccgtggacaatcccgtcgtggccgcacatgctccggccgagatggacgatgacgacggcctcgctctcgtcctcacgtgcaaacaccatcggtggcacggcgagcatgcccggcccgcggagcgcaccgcccgtcagagagtgctgggccttgatcggctcgagcttcgtatacggccgggtggcgtaccagccgtccttggccttaaactcgcggacgatcggcagctcgtgcagggccgcctcgagctggcgcgtgtagacgcggccgccgacgctctcgcggtgatgcggcgcgggcgccgtccgaggggagagcaggtgcgccatgtcaaagggaaagaagcagccggcgagataggcgcccgagaggccaaagaggacggctgacgagacggcgacggctcggacccgcgaggccgagggggggccgttcgagagccggctcgggcctccagccgtctgcggagtctgggtcgcgaacgaccggcggagcgaagcggcagcaaagcgtcgcgggatgaccatgatgggacgaggggtcgcaaagagtaatggctgggcgagttcgagagctacgggagaacgcgatgaggcagcggagcttccgaaggcgagctgcggtcgaggaggaggtcagccctgacgacccctcaaggaagagccgagactcggactcacggcctgctgcaagttcagtctacaagctgctggctagctgggctgatctgctgaggaaggacgaggtaatggatggcggaagggagcaaacgggcccgtctctctcttccctcgctgtccctcgcctccgcttacagctcgcgccggttgagccgacctcgagccgccttgcttccaaccatcgccttcctcttgcatctcccgacctggctggcctgagcggctcaatatctctctcacgctccgatggtcgcctcggacgcactctaccagatccgcttcctcccgctcaagagctcgctcgtcaacctcccgccgaagctctacacaagcctcgtcgccgcgcagaaggcaagcgcacctcctctcggaccatcgccggagcctcccgagagctgacctttgctctggcaaccttgtgctcgcctgtccttgttctcagaggccgcagtcgctcgccgtccatgtcaggacgcaagatggacgcgaagcctacatcggctggtcgggcctgagctcggcccggccggcacctggcagcgcacaacgcgaggtgttcgaggttgaccctggcgtcgcctcgtcgttcggttgggtcgagggctcgctcgtacgttgtctctctgaagccaaaagaccgaccctgtcctgccgctgacgtctctgccctgccgcgcaggtcgagctcgccatcgtccactcgctgccggtcgcgaaggaggtcgccgtctcgcccgtctcggccgacgactgggagatcatcagcgcccacgcccagtggctcgaggacaacctgctcttctcgctccgcgtctgcgctgccgggcagcggatcgacgtctgggtcaagggcaagctgagggtcgcgatggtcgttggtgcgtcgcacatcttgcgagcaggcgaggtgctgcgccgctaccctcagactctctggtccggggagaactctagcgtccctagctgacccgctcgccttggctccggctgcgacagatcgagtcgacccgaagaagcctgtcgttctgctccggtccgagacggaagttcacatcgcccctctcactcggccagcggccggggcagcccctccgccagcggcccctcagccgacagccggcccatcttcacgactggagacctccaaggcccaggggctgatttctgacgttccggccgagccgctgacgtcaggagctggcgaagctgaagcaggtgctgccaaggtcgacgtcgagatttaccgcggcttccggcgtgggcgtgaactcgagcagaagctgctcgctgcggcagacagctcgaaagctggaccggataccagcgcaacggtgcggcatttgcctggcctcgagccggtcgtcaaacaggcggttggtttcctcgtcaactcgtttgtcctccagtcgggcatgttcttcccgccgaccgtctcgcgtcagtcatagctggactcacccctgtgcgctacagccttaagatcactcgctgacagtcttgtggtcgctacttgacagaggctcgcaccctcctcattacgggcgcgtcgcgaagcggtaagacgacagtcgtccgcgaggttgccacgcggctagaggaggacacgcgcacgctcacctgcgcgtctgaccccctttcttcgactttgcgcactgcactgacgaatctccgttctcctctctgcagacacgcgctatgttgacatctcgaagctcagggatgagcgcatgccaggcctcaaggaaaagcttggtgagctcgtcaaggatgtcaacctgaatcgaccatcggtgctcatcctcgacgggctagagaacctcgccggggtcgaccttcccgtgcgagctaaacctgttctccctgaggctagcacctgactgaccttcgtccccgacggccttgccagaacaccgactcgacgcgaaccacgcagcttgcagagctgctcgtctcgcttctccagccagacgcaggcgtcttccaccccgggaccgtcgtcatctgcaccgccagatcagcgtcggacgtacacccgctcctttcgcagaagcacgtctttggctcgaccgtcgccctacgcggcatcagcaaggacggccggaaggaggtactcgacgaccttgtccgcgccaaggtcgctggcaccgagctccttcggctcgacgaggaggatcccgtcagcttcctgcgcgtggcgaccgagactgagggcttcctcgtcagcgacctcaaggatctcgtcgacagggcgatccagcaggctgcgatccgctgctcggcttttagcggctctcttgtgcgtgccatctctcggcgctgtgctctcagggttggctgacctctgcatcgacgactctgccgcaggacatccggctctccgcggccgactttgagggcgccctacagaactttgtccccttctcgctcaaagacgtcaagctacagtcgtcgtcggtcaagtggagcgacattggtggccttcaagacgtccggcggacgctgcgtgagacactcgagtggccggtcaagtacgccgcgatcttcaagcagtcgccgctccggctgcggtcagggtgcgtaggacgacttgcgctcgctcgtgcatgccgctgcgcagctgaactggaggctgacgcggtgggctgaaacagacttctcttgtacggctaccctggctgcggtaagacacttctcgcgtcagcggtcgccaaagagtgcggcctcaacttcatcagcgtcaaggggccagagatcctcaataagtacattggcgcttcagagaagagcgtgcgtttctaggccatccgcccaggcgcaggcgctctcgctgacgcctccatttccatcatgacgatggcgtacaggtccgcgacctctttgaccgagcgtcggcagcgaagccctgcgtcctcttcttcgacgaatttgactcgatcgcgccgaaacggtccgtccgctgtggccctccgcgccctgccgtcggtgcttacgttccggctccttctgccatcgacgtagcggacacgactcgactggcgtgaccgatcgtgtcgtcaaccaaatgttgacccagatggacggcgccgagggactcgatggcgtctacgttctggctgcgacgaggttagtccgagtttccgagccttgtcgccagcaggactgaccagtctgtcctctagtcgaccggacctcatcgaccctgcgctgcttcgacctggccgcctcgataagagcctgctctgtccaatgccgtctgagcaggatcgcctcgaggtctgtccactgaacagaccaaagtcctcgcgcatttcctggctgacgctcccttcctgtccccctctcttgccttagattcttcaatcgatcacccgcaacctgcatctcgggcccgatgtctcgctcacgacactggccgccgaaacagaacactttacgggcgccgatcttggcggcctaattggcaccgctcatctcgccgccgttcactcgtcgatcgacgctcaagccaatggccgtgatgaagcaaggtcatcctcgagcgccaacgcggcaacgcaggacgaactcgtcggcgaagtgctcgtcattggctggcgagccaagggcgggcagggtaagagccgcgccgagcagagcgaactgcgcaagcgggtcggcaagatggtcggcgtcggccgcaaggacctcggaggatcgcccaccaatggccagggctcgtcagaggcgcccgtacgtgtcgctcactctcgtcttcgctcaaccccgtctgcgcatgctgatctttctcgccccctccaacgacaccaggtcacgtttattactgccgcgcagcttgcgaccgccctgtgcgcgacgcgaccgtccgtcccagagcaagagcgtgaccgactgagacgcatctacggcgcctttgtcgacgaccggtcggtcgacgggctcgagggcgcagagggcggagggacggctgtcggcagcaggagcagtctcggatgacgacttgtcgacgcaaagctacttcagcgaccgtcctctaaaccgccttgttgcacgtcagagcgcttgaaggcggcaggtagagtcgagttggacgtgcaccgccgccaccgtttgcggaggcgagcaaacagttcgccgcggcgaagacgacgctgcgcctcaaggcgtcggcttgggcgtcgcgagaaaggcctcagctccgaagacagaaaggcgtacgagctttcctctctagcctcgacccagtcccttcgctcgccagctgctgcctgtacgtcttttgctcgcccggctccgacctgcagagagctgtggcgctgaggcacattcgctgttcccagcctcgatttacgcccgtctcgtccgccactctattctcttgcttcagcccaccgccggcttggaaaccctccacgctcggcgcacgagggcccacgacccagctgccgccgccccgacgcattgcctgatccttagccggtcgctcttcgatctgccggagcctgagcgcctagaggcgtcggatgaacggcctgccgacgacgcactggccgccgccgccagtgatgggctccggcggcggtgagtcaggccagcagcagccgtcgcaccaagctgctcggccggggccgcacgactaccagccatcacatcagcagcagcagcagcacgaggggacatacggctcgcaagagacccagccattccagggctcaggcctcgccggagcggcttcctttgatcacgagcggctcgccgacgacggcggcagcagcttcggctggcggggactcgtcggcgccgcacacgagcccgagcagcagcagcaacacaacggctctggctggcagtcgcaacaccaagactatcatcagcagcagcagttgccgccgctaaacgcctaccccagccggtcgctcgagccttcgacggcctacaactcgtcggacgcaggtcgaccatcaacgatccctccgccccgacctctctttgagggcggcggccctgacccgcccgaggactaccgtgtcgccttcgccaacctccagaggaagcagatcgagctccggctggccgaggagcaccgtcggtcgcgcgaggccgagcttgagatcctccgtctgcgcgagatagagcaccggcggtcgagccagagcacgagcgtctacggcgtctcagcccggtcctcctactcctccggcggtgcgcccgtcggcttcagcgccttcccggcggccaacctgctgcacggccagcccgctccgcactttgacgtcgtctcggcctcgacgccgtcatcgaccggctcttactcgcacggccagatggtctccgacgaccaagacgccggcacttcgaccggctaccagtcgtacgcaagtcccttgacggtacctctaccgccgagtccggccatgcagcaggaccaaagcctctaccctccgccaccgccaggtgcctacggcattgccccgccaggcagcttcgcctacccggctgcaccacctctcgcagatggactcagcggcccctacaacccccgaacctcgccgccgccctcgcaggactactcgcagcgtccttcctatgcttatcacccgctcgtcgactcggctggcccgtacccgccgccgccgccgtcggccttcgcaccccctgatcagcaccaccaccagcacgggtcatccttcaccggcttggatttccacggcttccagtcggtcgcgtcggtgcctcctgcacctcctctcgtcgtcactcgcccgtcaagcccgccccctgcgaaaggcaaagttttgaaacgggctgctcgagcggctacgtcgaaggacgcgtccggcagcacgacggccgggctgtcgacgcccagttcctcggccccgccaggccctccagcggcgtcgagcgcactcgccaagaagaagcgtcagctactgcagaagcaaccaaccgcgtgctgctcgctctgcgctgcgccgattgcccaccttttgcttcgcggcgaggacgagcacttcaaagtcgactgggagggtgtctgggtgtgcaaaccctgcatgggcgatcacatcacgattgaggactctggtcggcggcggaagcggacgaggtcagtctggtgctcctgcttttgcttgcgctggctcgctgaccgcctggtcgcctcttacagggacacgcaagacctcggggcgccgctcacgtgcgacgtctgtctccagctcaaggggaagggcggcatcatcgccaaggactccaagagccctatcctcttctcgaccgaggtgcgtctggccgtcttcgagatcgtccctgcgcatttcactgacaagttggctttgtcagtttgtctgcgtcggttgtgacaccaagttccagcggtgcaccgactgcggtggcggcggtggcggccggatcgggtaagctgcttgcccttctcgtgcttagggacttcgcctgatgcctgaacgtgcaccctcgcagcattggcaagtggcgctcgcgcgagctcttccccgccggccgcaagacgtgctcattggctcgtgcgtgtttgtttgtaccgctggccgtgccgaacttgcaagtgctgacggccaggtgcaatcccactgcagacactcggatcggcagcgcgccgctcacctttggcgtctgggacggacgcgacctcaacgacgtcgccattcgcgagagcctgatcgagcgatgcgaggcgctttggcgagataagctcctgacccggctggcgatccccgaggtgctcgagtgcggcgcgacgcccgagcggtcttttgacgacatccgggccgcgctcgacgagggttggccgagtcgccaggtgctctttgagagccccaacacgccctacaacgaagagcgacggcgctactttggcctgacgtggtgcaaaacgaagtatgtttccaactgctcccttggcgccagatgaaaggaccttagtgctaaccgcactttgtacccaggccccgacgacaagcggccaacggagagccggctgctgacgaggcatcgccgccggccaacgacccgaacggggtaatgcttggccctgattcgctcagccgaaccgacatcatcccgcccggccacgagcttgtcggtttgtttgtcggccactgggcgatgaatggtgagtctgttcgcttccaggccggctggcacccactgacggcggtgcttctgggctagatggcacgcttcttatcacgacaagccttccgttcgagtcgaccgacggcgacgaccgcaacgcgctcgcgatcggcgaggtcgcctgtcgcattgtcctcgagatcgacgagatcaacgcgcgccggaaggcagaccaccaggctggccgcgggccgccaaacctcatgctgctccctccgctggagcatctctgggttgtctgcgacagcgccgactcgctcgtccgcgagcgcatgcgtgatctgctgaaccgccggcggcagtttgaggcgctcagcgactacgtccgcctccatccgcacgtcaacccggccattttccaggtccaagaggacccggtgtcgtctaaccggcctggctggatcatgggtggcgtcgtcaaggtcggtttgatcgtcgaggtcctgtctcgaccgaaagctgactttcaactctcattcaacttttgcaggccgaagattgtgcgaccttgccttcacactagctcgtctggcagcaagcaactgactgcttcttctctccctgacctgcaggtgaaatccacgtccgatggctcggcccccactttgaccggcagacgctcgatgccattgccggctcagagttctcgaagcggatgaaggccaagaagccggccgcaaaggccgtctgacggaccctctcacatccctccctccaccctagagacactttgacacgccctctctccttctctttcgctgcctcgcccatcgaggcgcgtctcacgatccgctccctagacgaccctgcccccatctgcactcacacaccctcgcctttgatgccttctgccttgcttttcctctggccctttgcttcaccctgctttgcccacctttatgtcgagcccaccacggaatctgcatgcgctgccgtctgctttccagggttccgaaccgacatcgggggcatgagatcatcaggagaggggagaatgtgcgagtgcgagctggctgacgaggggctgtagaaggggggggtccggtcccggaacgccgtcgacgacaccctcgccctggccgctcggagcaagaccctcaagtacaccggccgggtctccgctcccttccgtcccttcgtcctctcgtccggcggcgcggtcgagaccggcaccctcaagctgcttcacgcctggcgggaggttctcgccccgtcatccttctcgcacctcactcgaattctctctctcatcctcatccgggctcgggcccggctcggtcgactctgatcgtccgaccttggcctctgtctggtttaggataccggtcgctcggtcggtctagccacggttgcgctcttccgccgctcatttcatctttcttctctctcattggctcctccctcttccgcgtctcttccgctccgtcttcttcaccctccgctttcgcatgcccgcttccctcttccgtagctcttttcttcacctctctcttccccctctcgacgactcccctcctccgaccactttaccctcaggtagccgacccgaccctactccgttcgtctctatccccgtcccgcctcttcttgaccgtgccttacactattcgatgctgcagtaacccttgctcgtgcagatgagcgggttagtttgctcgtgcatcctctgctggatcctcttgtccgaatcgacggcgaggatggccggaacgtgggcaactgcgtctcccattccgggaaacgggtagacggggttcttttgccttggaaggggttgcagcggaagagggctgcgtcgacgccctcgggcgcgagccgcttggacgcgagtcgctcaaacatggacgggctacttgtggtttttgggagggtctgggggcgaagagatgcgctggatcccggacctcgggtgaaactcgatgaggaggtcgttgtagtgggccggaattctctggattcctgtgctcttctacgcggccgacgaggcgccggtccatatcagtatctcactcgaatcatgtaccagcgccacaccagtacgcagaatggtatgatagtggtaggttctggaagcgccgttttgcccagggcctgccgcatccgcagtgcttacacgcgtggctaggagacggggcccatccggcgcgtttcggaatcgctcttcattttcttgagaagcccccttcagccgcacagttgaacgcctttcaccggccgtttcattaatcatgcaatcgccatcaaatgcggaccaagaatcggaagggcagccgaccggaaacgcatcggctcctagacattctgacggccgctcgcagaaaagggcgtcagctagacctggtcttgagccaaaacctttcgcatgaaccgcgccggcctccaatcttgccgtatagctgaagtgagatcaactttcggatgaaaggcgagatcatgcctatgcttcggcatacatgcctatgcttcggcatacatgcctatgcttcggcatacatgcctatgcttcggcatacatgcctatgcttcggcatacatgcctatgcttcggcatacatgcctatgcttcggcatacatgcctatgcttcggcatacatgcctatgcttcggcatacatgcctatgcttcggcatacatgcctatgcttcggcaaaaaactaatatcgccgcggggaatcgaaccccggcctagtgcaagttgccagatggcaagcaccaatgaataccacttcaccacaacgattttatgaatactgcaacctattttaatactatattacgtttgctaaggctcggttgtcccactgtcaattcagtgcctgcaggctggaaagcttctctgctgttcagtccttaaaattcgccggtctcatgggtgctcaatctgtcgtgattgacttaccccctaacccaactgctcaggcggctctcgtactcgaaaggcagctttgtgaccatcagaacggcctggaccccactgccctcaatgttctgtgatcatcggattgatgctgtcacagagcctcaatcagggctgcaagtcgaaagttcaaagaagggcagacgaatcaaggacgcgcaacaaccccaaccgagtttaaatacggggggggaggagatgatcagcatgttcttcggccctccccgacgcatcctccgtgaccatcgttgacgagcaggaagaagaaagccaaacacccttgatcggtctctcgctgattcactctctgcgaggactgagttgagacgacaagggtctgagtaggaagatcggagggagcgtgtgtgacgctgcatagcaatatttcggccgcttgcaagctacgacatgtccgggggttgacctgctgtgaaggaatcatcttgcgtgatgatcaaagccttccaggggagctcttggagtccccggtgaccaaaatttagcgtcacgaccgccaatcatgagctggtggttgtgatggctgagcacgttgtagcgagctatcccctcaagtgcctgcttcgttgctcggtcgaggcctcgagttcgaccgcggcggtcagggcggtgacaaagggcgctcggcaggagtgcctcgaaactcttttgctctaagtcagaggacgtccagttcgactttgtggggttcggaagaactttcacgaagttcctgccgccggttgggtgtggccgcacgccaagcaccagttgagctattggcatgctaagagggggttgaccgccgtcttggtcatccctctcccagccgcgtgtcttacaccaccgtccagctggtataaacccatatctcacccgacacatgtaccagtatcatacaagtaggcatactggtccggtactagtatgattttcactgatataacgctggtaggcctggtcaggctactggtatggtcctggtaggccgactagtaccatagtattatggcagactgctatcataccagcatatcttcagtatcttctacccgtttaacaaatcgacccctcaaaactcttccggataccttgctgaccacactcaccgagtttgagtgatatccgctttgatctgcatcaaggggaggctgtcagggtctgagcggaccatgctaatgtgataacagtacgtcctaccggcagggtattggtacgtatactggaaccctatcagatcggtcctagtgtcataccggctgcacataccagtaggcatactagtatgtgcagccggtatacctaccgtaccctcttgaagtggtctcaggatcatataccaggttgtccgtggtgactatgcgtcgaccccttaggcgggagctggggtctcgcagggaatgtcgtcattgtccacgtcgggcggtggcggcatgccaggcggggcgtttggggtgggcgaggaggtgtaggagctggtcaagggccacctccagaaccgcatcacgaaggacttttgtcctccagagaggcagagaggaggtgctgcgctcgacatccgagcgtgccgctgccaagcttcgctaatactacctgtttgattccaatgacatttgctactgcgcgggaaatgaggggctacgctacggaaagtcccccctcggcgcggtgaacgcaacgacggcggccggggcgacagcttccgaagcggcgactgcctgggctgcgaccgggacgccagatgacgagctgatggtgccgagtgctggctcggcagccggcgatgacggcgcatcgtagtcgatgatcatctcggttaggtcgctgttgagggactttcagacaatgcttagaaggtcagcatgggccagtcagcttcgcgagccgccaggagggcgcccagggacagcagcaacatgaggtacagccatggcgctgggcgggagcaattggcagagcgatggcggagctcggggctgtggcgagggaagccaatcgtgggcgctggataggagggggctcggtggagtgacgggccacgaagtgctggtcagagggcagggagatgccgtagatggcggccagcggctagaggctgagctcgaaacaaagaacggttcgagcagcggggtgaatgctcggctcgcgacaggggtcagggcggataaggggaggtcgagcgaagacgcgaaggcggggcacctgcgcgggggcccacacgcctgactcttttgcgcgggcgtggacgccggttgtctttggctcaggagggacctgtcgtatcagttcctttttctctcgtgtgtcgcgccagttccgagccgataccgcgagccatggacttcaggtaagtcatgtcagtctcggctgccttggcgaggccgggccaaccggcagctcgctcgtgacgtcggatgagagccagtcatttcataagagagagacctggcacgaggcggggctcctcttccttttcctcttgtgcaaagtcgaaaagtgctttctgagctgtcgacccaatctcatgaagccgtggccgagaagggccttgggcggcggagcgaacggctctgcgccttcgagagcacggaaagcgggcaggtcgctctgctcgcgggcgggcgcttgcgcgcgtgctctggcgcctcgacaggggggtgcgctatgttgttggtcggatgaatctctgagaacgatgggggtaggtcgagctcgttagcgaccggcgacactcgccgcttcagtttgacgctccagtgtagatctcgttgagctttgtcttgccggtctcgttcaatcgcatagagccgacgttcgacatgcttttgttgcccagatcgagcaagatggacctccgcttcgcattgtaccaggcggcctatttgactggggccttggccccgttttcgtgcgctgcctcgcgtagagtctgatggactcggacgtactgctccgcgtccgagttcaagtacagcaggcaacagtcccatgcgctcggtcgagcgggaagcgaggcgcgtaaccgaaaagcagcggaactggggcaaacttggtggagctttggattacgccgttggcgacagcctggattggagctgtcaggctcgcccagtttgagcttgcctcgtggacataccctcggagggcgttctcaagagcttgattcatgaacaggctcaggcccagtgctgtggacgcctcgcgccaaaaggacgcggtccatcgctagtctcagtggaaaacaatgttcagtggcttaacataaacgagagacaccttcgtcagaagcagctgggccgttttctccgccgtgatggagctgagaacggtgaagaaaagagaaaactccgtaagcctgtcgacgacgacaaggatgctgtcgacaacggctcttttaggggtctggctcggcggatgctgtaccatcgaatcaaatgaaaacaaaaggctgcgccggaatgttcaacggctgcagcagccccgtcttctttgcgtggcttggcttattacgctgacagacgaggcagctgacgccaaattttttggtcatagcgtactggttaagccaaacgtaacgcgcccgtggatgcgtccgagtcttttctgctcccagataggccagctgaaagaaacgctcgtgcgcaaggtttttttttttatgcagctcctcagtaggaaggcacaggccagggtaaccttcggaggtttcgtacaagaggccgtcctcgctcaagaaatagccttcgctcgttgaccccgctgtcataatttcaaacggctttgatactctggcgatcccgagagccatcgcggacggccgacacaaactcggggtttgccgccgagaggagcgagcctaaccagccgaaaggggcggctttgacgaactcaagagcgtcgcgctttggccggtcctggctgactgctgccgctgggagcgctttcgtcctagttgacttcggctcgagggcatcgcctatgagttgattcctgctgactgctgtcacgggtagctcctcgactaactcgggggcagctcctttcttttcaaggaggcgcacatgttgtccaacatagcaaaggccggaggcgaggacaagacttttccaagccaagcaacctcctttcgcgacaccccgccgagttggcccaggtcggtcaaagtggaggatgaaaaggcgagcaaagaaggcgtcggccagctttgcctgcggcgacggttcaccggggggccctagcccgcgcgcatggccgatgccgcatcagttgactcggtcgagatggtgatctcttttgttggaagagtcaaacgtctgtcgacgtcgggtggatgtgcttgcgaagagcgactcggctggcaggacgcgcgacagattaggatttgttgcgcgtccgaccgtgacggtgtacgagtttgatttcaacgctgctcaggacggtgtcgtaccccgtcagccggttgcttgcttgctccaagatcttccccagatgagcgtgtgatggtcggtgattatcttgagcgaaaggaacgcccacgacgaggggcatcattttgaccagcccgtctttcatcgccagggccttctgctcattagtcgggtagcgcaactcggcatcgctcaataggcgggaatagcagtttgggatgcgctcgacgtagacgacgtgacagagcggtcagcgctggaattgctttctccgttccaagggacaggtacaggcgcggcggcgtagtgtcggcctaaagtgcgcggcgaaccgcttaaaggtctttgtgcctttgagatctccgacccgaatggactggatctgctggagcactgtcgaaacccccatattatagaaagcgttggtgtagagccgatacacattgagcgacccgtccatactcctccgtcgcctaaagcgtgggaggaggctacgagccgccttcaccttaattcgcctcttgagaagaatttattcacgctcagaagagaccagcaactaaggccggttcctttttcctctgattcgacgagttattgatcacctgccctgtaaatcgcgattggccttacgaagtgccgcctgtcttgagggtctctttgacctgttcacgccgtgctagagagctctgagacgagcttgccagtcctcagatgctttctttgatacacgtcattgtcatgcgccacagtcgagtaagctcacggggagagtgggtcaccacctccatttttgcactcttgctctctcttttggtcaaggtttgagctatcgtgggatgtcgcatatgttctttaatcagatgagagttgttttttgcgtcaatgtcactgggctgcagacaaacgagtaacaaaggataattagtggtcaaatgaagggtaggcgagattagtgcgtcgcgtccgtcatttgtgcttgtgcagtctgatatacacccgctcgctaccggggtgacatgacttgtctttcgaccgtgagttcgccgtgttcctcctcgcaattttgtcgtccgcttgctcaacaacaagacgttgtgctcagaagatgccgacagtaacggacgtttgcaagcaagatacaattcacggtactactctttattgagtagttaaagaaatgaaaaaacgcgagtcagatgatgaagtacaaggggcccacgagttagagcaaaagcacccattcaactaaccaattcaactcatccagcgggaaaagggtataagcgttcgactggcaaacatgaaccccatagacgtcgaagtgttttctctctgtgacaacatcaaggaaaaatttagctttcgcaagtcataaacacatcggcagcatcgaggatacgtattacgatcttgtactcttttcagtctggaccgtctgctctgaatgtccgcaatactttttgggaccctttagcaactcccaatcctttttgtcgtcttcgtctccctgttttcaatcgcatcattttagaccaatcaccacaagcatcacgtgggtaaaggttatacaatgtatcccgcgcaataagcacggcgagaacgccgctactcatggcgttactatcagccttgtggttcccagcgatcaaggacagaaatactgacccggcgtaaagagcaacagtggcagccaacagagagatgagcgagaaatacgtttagcaataggcgtgcaacaacgcgtacaatttcgaagcacaaatgctcgaaaggagtcatcactgggaactggctccgcagaaaatcgcctgacgccgaggcataacacagccacaattggtggctgtacggattgctcaccgctgatgtgtaattttgttgattgaattttcgcagtgaagtcagcctgtttcaagagccggtccatgagctcccaaattgttcagccgacaaccaatctacctaccatgtagaaaataacgactgagattcggagctcgagctcgtcttggaaagattgtaagtcgacggtaaccgcacttttgtcgcgcatccaatgatgggactttgaacgctttgcatggaaaatctgatggagatggaaagctgcagattgtatacaatactttgaatctagggcaacaactccgaagggctatacgtccagtgcagtcagttgctccgttggcacgcacgagcctgcctgacagaactgacgtaggaggcgtggccgcgcccactcaaatccaggcggtaccgatcttaaagcttttcgaaatatccgcaccaagaagactgggagtcgatgacacctgcacctgcgtacgggagttacagcttcagagctcagtcaagccctcgcctgtgaacattattttgaaatgggatgtagcaggcttcgaccgccccgacgcggtgaagatcaaccgactgaccccgtcgtaaattctttgaatggaattcagcacgggagaattctcctaagatatgaacaaatgtgtcgagttagaattgagtgctggagataccacctaggcaggctgtgcaattgatggcttggtcttgccagagacaataattcgtcgaggatcctgcgtacgcgtgaatgtttgtcaactgattttttttgccgctgagctggtgataatgctgtaacaacttcccgtaacctatgctgagtaaagatactccctccagatatagctcagcactcaagaatttgtgtcaacatattcagtatggaccgtgtgacgagctgctgagcctagtcgaaaagcactgtgatttgagtttgagtttcgtttgcttataatgatgtgtaggcgacaatgtcaacattgggcaagtttggtattgtatgtactccggccgtcaagctggactaatgctgtaggatttggccagcctcaaagcagactctcctcaaactctggtccgcggttcgcgtgtcaaatcaagtcagtcagacacaagctatatctggcgattcaacgaaagtctgccaataatggtccttcgtgtatcatattctaagctggatgcatactcgctgaaatatcacaaataaggagagtaaggaccttgcctcgaaagaataggggcgataagcatgtacagtagacgttacctgcaagagcgcaattcaccttctgtggagttcccatcggccgcttgctggctggtctcgctcttcgattgcgatctccttttttgcttttctgacttatcctttttcaacccttactttgagtcgctcggtattccaagttcttctgcaacgttctcaagcagaacctcggaaaatctctctcagtgccggcagtcagttgaatagacccgatctgctaaaaccccggctccaaacagaaccacgttgccgtccagcaattgcctcattgcatgccatcatacaagtctgtactgcacaatcaacacaggccatcgtgacgtaatcttgtgccaactaaccattgctgcaagactgcatgacttatgtagcaagactgcagtgactcatgagagcagatgatatctgaattcgaagggcttcatgacgtgatttcgttcgagcgcaacgcaatcaagaatccgagactgcgatgaactcactagaaagagatgacaggtctgccaagagcccgcccgggtcgggatggagtcagatcacgtatatttgcccgttgtatttagtgtctctttgtatagccacatgggagtatggtctcaatgatgatcacaagaagatcaagcaagattcggctgccgttgattcagtcgaagcttaagcttaaggtcacgaagactttagatgcgggttaaaaaccttggggcaaatcgccgtctgagaaatgttcgagaagggataaagagattcgatctccagcccttgccagcatgtctcgtaccgtgtcacggcgggagcacgaaacggttggctgacgtttgaggtgtcgcgcaaggtataagagccaacatggctaagcttaatggcaggatagttgcccttgaatttggtttgacgcgaatcacggtcttttgcctcaacaaaaggctcgtaggcacttgctgaagctgcgacgacaactcactccctgtccagtgcatgctttcatcttgaggtatcacctccacgtacttcgtcatccttgctaacatagctttgagcaacatacattgactgacctcgaagcctgcccggatactatttagtccctgctttgaccaaactgtgtgcacttacactggttactgtcgaccacccctgtagttccaaacgtctcctccgacctccctcaagattctccgcgtttgattgtaacgagacaatgatgaactatttaaattggtgggagctttctaccaattgggcgcctgactagtttaatggtaaaacgtaggtctcataaaacatagccatcctcagctctgagttcgattctcaggtcgggcatctttttgcccttgcgggaatagataggtgcacaagtccgggaggaggtagaaaccgcaggcatccatcgtgagggaccgaaaagttgtgttggcagtagcaggggtccagctgctggtgtcaggtaggccgcatgcatgcgcgcgacaaacgagcgcggcgccctcgagcgccctcgagctccatatccttgggttggaggcggagtcggtgcggtgctttgccgctgtggtcgccgcgacagatgatagcccccggaccacctgcatggttgtcatgactgatctgaacgaggagcgcgtagcgtcagccaacgtctcgccagcgacgtgacgcttgagcatcaactttacgcccatccggctgcgtccgagcaattgcgaggcaggcctccgcttcaagacaccgaatctcgctgctgacctaataccgatgctcaaccccttggtcgtcgtacgtcgttcagcgctcggcgtgccatcgcgatttgccactgagcgtcgaatctcaggtagtcttcttgatgacgagggccaggttgcgagctttaaccttaagtgcaggaaagcgggccaagggtcagcgcaagtgcaggctatgggtgtcgcatcagacgagaaaaatgcaggattagtgtctcaaaaacttgcgggcctccctgagtaaggtgacggtcatcttggctggctgctcaggcaggccagaatggctgtgagaagcgatcgctgctaaatgttgctgaggccatgagaaataatcgggtcgagcgcgacaaaatcgcccattgttgcctcatggttgagaatgaatgacatcgtcggccagaccaatgagcagcggctgttgaccagatcttgtatggaagacgatccactcttctctggaggcgacgggaggctagtgccatcgagaaggtgctcagcggtcgagcgttgcccgacggtcggcgcagctgatgcaccatccgggtcggagggactagcgagagactggcgagggccgccctgtcccatctcagctcgtaggcccatcttcacccacgctatcttgccccctccttggccggcggccaggcggtctcctcgccgaacggccgtctgagcactccgccatgtgcgttcgtttcctttcccttctccttttgctgggtgcggagcccccagggcgcaggcgcgctgagccgagccttaaaaactcccctctcctcctgcgacataccggtcaaggaagagtagcatcgtccggccgagcgggaccgcacggacgacgtccaggccgattatcctcacccttgcacctggtagtgcggacgcgggggccattttaagggtcgccttttctaagaccatcgccgaagccgaggcgtttttcaagaacctacctggcatgcacaaaaaggccaccatcctgccgatgttacaggttggccgtcaatttcggcccccgagatagttgcttctgttcagtcagactttactgtacttcctgctcgaccttgtaacgctctccttatcacaatgcctgcgttctcaatccctgaccactctgtatacttaggcattgtttcgtcatgccagactcaccagttgtgcggccgacagcttctgaccacaggagcagatggcgtagcccgctcttcgagccgactagcgtggtgttgttacacaggccgtgcgggatttgagatagacgagactgatggtcagcttttatagggtagaggcagcgcgggagctgaaatgaacacggacgtcgtgatgcttgaaaatgaccttgtccttgatggcgcacgagaccgaggcgtcgacaatgagggtgccgaggtcgagctcaaagatgtcgctggcgacagcgccggaccgatagttgggcccgctcgatcaaagggtagcttgccgggtatgcgggtagacggcgggttccttgcagcccaagaagagggaagcatcgacgtagctgctcgagaaaagcgcagatttacaaatttgccggagttgaccttagcgtctcgacgagtagcacttgaaatcttacagatacatttaataattccggcgaatggacgttggcttgatggcgcagtggttaacgcatcgcacttgtaatgcgaagatcccggattcaacttccggtcgagcctttcctttttactttcgctcgatcaggcttacgcggttactcgcagtcgcgcgatagctctgtgcggctaagatatcgaagcaccagcgcgccctgacgacgctcgataacgcgatgtgtctcgtttgcactcaaagctccgttcaagggctatatgtaatggcattcgccagaaacctcacgcgcctgactttgcggtcagaagggttcatgacttgcttgactggtcggtcggggccggccacattggctaggttcgacggcggtgaaacgccggcgctttccttgtagatcgtcttcgccgcctgccggaccgctgtgtaacgttcgccaccggaatctatctctatgtctgctgcgttgcattgtacacaggcgctctctgaggcggctgtggggcgacgcggaaaaggccagcaatatgaaaaaggaatagaatgggggcctgcccatcgacggggagcctggtctgccattgttttttttttccatacaagaaggcgttttcaatcggcagcctcgaagcttccttggtaaggtggaaagccgtcaaagcctgctctttccaacacccatctccccgtccgctctcgctatcccgcccatcccatcttgacttctctcttcgtctaatatgatcagtctctctttgctttgtctgctgccaggttccggccctgaccgaggccttaataagctgtagaaccattcacgcttcgtgccggcccggctcatcgccatgggcgccgccattacctacgctcggggcactggccgatttaacattgacgggctttacccggacggcaagatcgtccttgggcggtgtgtcaacatacgtctcgagtcagctttgcttgtcgtcccgtccggcctcctcggcaagaccatcagcttcatcgccgttctgctctgcgtcgagtgtctccgcacttagcgggtctttcggctaaattcaagccagcttttcgacacggccttgtaatgcgcactttctcggaggcgaccgccttcattatcgctcggaccgacaccgtggtcgagcacgacgaagacggcacctcccggcctctttcctttcccaagctagccttatccctcagtcattttgacggaccaccgcggaaaccgcggcgtcgtcctccctggctacggcatccttccttagtctttctgcgctcgccctcctcctttccaccaccctccctcctcctctccacccgtcctcgtccgcgccactccttcctccccgccagcacataacttttgtcaaaaccaatgccgctgcggcgcagacttttgtgtgccatccagttgcaagtaggttgagagcagcagctggaaaggcgcgggctagagcatttttgcatcaagtctaattggcggcgtttacaggatgcgcagaaaacataaagagttccgtgctatacttggtaggggcgaatttcgaaacattcggctcatcagagtcgaacttcttagccgatatggagacgacctggcaccggctgagttggcgtagagcttccatagctgctgccgcttgcggcgggccaagggttgtttcattaagtaacactgtcataatatgtcagtcatacgatactgagtgcacggaggcaggccatgaggcagagtcgcgtctttggctgacatttacatgactttccggttacccttgtcttccgagaggttcgagagccggccgacaaagtcatcgtccgcatcgtcgaccgcgacgtgtccgtatcgtcgaactcgtcgtcagcgagggcggagctctgcccttgcccttgtcgttgcccttgcgctttgctttgagctgggatgtgttgaaggtgttgctgcgtgggcgccggctgagcgcagcgcgggcacctgggcgcgccgccagcgcctcgcgactgcccagcggccacccgggcaccacgccctggagtccgccggactctttcctcctctctcttttcgctccctccttttagttagacgcccgctcgctctccctcctatacctcggtcgttcacggagtagtcctgagactgagtcggccctgcctcttgcctcgtcctacaggatgatcctcgggcttctagttatgcgcccgcgcctacttgttgatcatgttttttgaggctgttgaatgtgctcgcacttgatgaagtagcactctcacatccgggagcagtgcttgaacgtggacctcggggtccaagacggcctttcgcatcctcttttcgggcggtaggagaccggtcgagcaaaatatcacgctgccgccgcctgggccactcagcaagcctccgcctgcggatcggctttggatttaacttttcccgtttgcttcgttcgttttaaccaggatgaacgggctcaaacgtcaaatctcatttttccgacatcatgctcattgaccgttagaatgagctcgttcctctccccgcggttcaatcctcgacatcgacctcgttctcctcatccaccaactcctcctgccccccggcgtggcatggaacaaagcagccaagcagaaggacatgaaaatcattgccgcctcaaaaaggagacagatgctcaggagacgaccacccgggagaaacgatgcaacggccaggcgccaagaggaggtgcgctgcttcctgtggtttcgtcagggcgcgaagacgacaccaggcagccgcttgacccacctccgtcggccgagattgttgtgcagccctcggggggcttgaccgagcgaagcagatgtcgacgtgaaggcgtccgggttttttttccttgcctcgacaggagagggcttatgtattgcaaagcaggagcaatgtgccagacagaaagccaatccggccgccgatagaggcgaagatagaaggaggagagtgtcgggggaggtcgggaagaggcggcgaagcaaggcaacgagcacctgatgagacggttcggccagcgatcagctcgaacctttgatggaggcaagctcgcaacagtcagggagggcctcatactgggaactgcatgggctgacaaggaggatagtgtgagagggaggagtgagggaaggggaggcgcatgatcgtgtgaaggaggcagggctgtggcggtttggcgggcgatcgctcggcgctggcatgctgcagcgccgccgcccgctcctatcatggttcgaccctgccaggaacagcagatccccggctcggggttcgaacacagggcctcagcccgcacgacagaagagaagtcaagcactacctgttccccacccgtcaccggttggcaatttccatgtggaacctctagtgcgacacccgatcaacaccggccgaatctagacccggcaaccctcggtcgccggtcgttctccggcatcagctgtgccggcgtgagtcaccagctccaccgaattagtcagcatctccaccggatcagtcagcaggcacagccttccagaagattcttcgccatcacacttctgtaggacgagacaggaggcagggccgactcagtctcaggactactccgtgaacgactcatggatcccacctgtaggacgagacaggaggcagggccgactacagtgggggtgagctactacctaggctaaaggggtgctagactagggggggcgaacgtacctcagtctcaggactactccgtgaacgactgaggtttaggagggggagcgagcggtcgtctagctaagaggagggagcgaaaagagagaggaggaaagagtccggcggactccagggcgtggcgcccgggtggccgctgggcggtcgtcaggcgctggcggcgcgcccaggttcccgcgctgcgcccagccggtgccggcgcagcaacaccttcaacaacttcagcctacttaaacccctgtagacctcgagtcgccacctgaatctcaagcttgcctctttgttccccctattactcgtccttgcccgtcagagctccagcctccctcctgcccgccacttgtcccctaacatctcccccgtaagtctttagtcatcagtaacccctgcgcgacctttcaatcagccaaaatccctcgagggattctgcctcgtagactcacgcctcgtcttacaccttatatgagcctctcacatatttgagaacctcttcctgcattccgcgcccttaaggagcgtaatctgcgcaggacggccgtcgcaaagctgccagacccgcccgagtgcgccatctacggcgagacaaaggcgttcttaccaaaccagcggctcggctttgcccttgtttgctcgactgggcgtcattcttcttccgaatatcaaccctctctggtgcgacagctgacccgggccctcctgaaacctacagtgccagattagcgttcatgaggaccttctcgctaaggaggccgagcaggacgagaccgagtgcgagtcttgccagcggcgggcaagtgaaggcgtcaagatctgccgctttttacccagccggaccatccgacctgctgcaagaagattcgcaccctttcacgtcaatttcttctgcctaggcgcttgacctgaccaatagctgtgttcctggtgccgagtgatcggcaaagcttgtcgtgctgatcgtcgcacagtgtcgtcctgctttccagtcactgcgacgcccgaggtcgccgctcaccctatcttcagcgccgcgcagaagatgcgtctctgctcgacatgatttcgcgcagtgcagcatttagcgccgtaggagcgacctccggtcaactccacaaaggacctccagcggtcctagacgagcttcattcccagtcgtgactcacgactgagaacacgtctgactctcaacatgacccccctgacccccccccccctcctctttctccacagaggtaccgtgcgacgggaatccacaattcggcagttctcaaccacctgatagacatcgagggcgtcaagcagcgtaattacccaaaagtcacttctactttttgcacggccgagcagatcttttctcataagcaatactcagaaagaacgcgcgcagactgacctgcttgacaatgtccggcggccgaggccggggacgagaaagacattcttcagctgaacttgccgttggcgccgacgaggttgaccgagccggtgcgcgtgatcttgatcgaccggctgttgccgccttggacgacgccgcgaagggagcaatgtcgctagcaggcaacggtcaaacatcatatggtcggagatggatgttggaattgcgacgagcgcggcgcgaggcgccgagggagcggcagcagcaggcggctacgcgcacgctggcggccggaacgcatcggcatttcccctcttttctctctccgaataactttccgctcccctccttccataaagacctcagtctacttcttggtgactggggtcagtctcacctttcgcctttttgctcaccgcttgtgacacgtcctgacccccactctaggtagctcattccgtttcgttccttgctcaacagagccctggaacgctcggaaagtcgcaccggccgggttcgaactggcaaacacgcgatatgtgcaggccccatccttgtcggcgcaccggtatagccgggagcccgttccagaagcagccggcggactgtcgccatgtgccgttgagtggaatgcatgtggatagcaaccttgaaggcctcgcgatcgcaggagacgaaacgaaagacggcgaaatgccgatgcgttgagcgtcgtccggattattgcagcggctggccgcgaggccgcgactaccgcggccgtggccgcaaccgcacgcgcagcagcccctgccgtcgctcctctgcgcctcgggtgaggcttcgagcatccccgtgtgacgcctcttgccgtgagttttgatgggacatgatcgagagcgagcacggcgcaagcgttgagcctagcctggccacgctgccctcgatacctacagttgagcgaagggctgccgacagcgcgtggtgaaggcgtcgacgttcggacccgtctccctttcacttaagcgcttctggtcgtatcgatcgtaccgatcagactggcacactaccaaacatcgtatcgtaacagatcatcacgttgttgcaggcgtctcgcaatcaatcccattcaagcccctccagcccccgctcgacaattcggcgcgacttgcggctctgaattttgaggtacttgtggctaaaggagggagtcggcagcagtgtcagctccgcggcgagaggcggcgcaagagtgacgtggtagacggacagcaggctgcacgcgtcgcgaacgatgacgatggcggcggtgccgacggcatttctccaccagaccggatcgagctcgtcaaaggccgtcgcagaggccaagccagccgagccccaccaggcggcgcccatgaagctggctccaaaggtcgaccgtcggcggccgacgccgaggaaacgagcgagagagggagaataggtctgggcgagccagagcaggccgcggcctgccagcgccgacagggccggcatgacgagagcgctggcggcgatccgagtgagcgaaaggcgcgagaggaagagtgcctcaagcgggagctcgccttcgcgtaccggcccgtcttccggcggtggtcctgcagcaatagcgagttcaatggcagcaagctcatcgtccgtgtcggcctcggagccgtcgtccgtcccgtcgggtgtcgcatcgtcggccggcgcatcgtcgcctgcatctgagtcggcagcatcgaggacgtcccggtctgggctctagtcagcaatcgtttaggacaagtttctggcccccgcgtttcggatgactcactgatcggagcctcgactacgtctcgccgcctgcgcgtgccgtcgacctcgtcctcccagacacggacctggacgcgcgctccagcattcctcgcccgagcgagcgctagcgcaacatcctctgtctccacctcggcgccctcctcgccgaccggttgatcgggctcgaagacacgaaagcggacaccgccgtcggcattgggcgtcgcaaggaaccgctgctcggccggcagggggtttgcacgacggggcataagccatgagaacaacgaccggcgggcaagagtcgagccgaggacaaagcgttcgacctcccgcttgagtgcgactgcaggagggcgaaggctgggtgagtcagctttggtgctcggcccggcaagcgccctcgcacaatcgggacgtacggtatgcgacctcgccgacgcccagcatcacgatgattgcgcccggaccagaaggccagacgccgagcttgacgctccagaggtcgccgacaacgcctcgagaaaggagccacggcccgcgtggcgtcgtcgggtggtggagagtcggccggggcaggagaaagaacggcgtgagaagaagcagcgactcgagcaccttgacgcgtgcctcggcgaggaacgaggtcgtgagcgagttggctatgaggccgaccggctgagtctcgcgaaggcatggtcagcatgtggacctgaggtgcaaggcgagtccataacgacgcaccacgagcggtagaccgacccacgcccaccagcgccaggcccccatgccgttctgcccgtaagcggaaccggtcaaagtgatacgcgcgacgtcaggcccgaagaagagtcgaagcgatgagaaaccgatgagcgccgaggtcgacaagatggacgagccgagggctgcgagagccgttggccgtgctcagcgttgcgcccttctaggtcggacggcaacagaagctacgcactagagagaagcaggagggaagacgctctcgcgacgtagcggtcgccgttgttgaggagcttgagtaggacgccgaggttctgcgaggcaggccagccgagaccggcgagtcagtgcatggtgagtcggatggcaggggctctacactgacttcgtcgatgaggaactcggccttgcactgtgggcagaggactgtcgagcaggaagtaatgtcagctgccagcgtagaagataagctgagcgagatgtcaggccgcaggaaaactcacccggctcgcggtcgccctttgactgctgctgcgaggcgacccacgtcaggaggcacgactcgtgggcgacgagcgtgcagttgcacgggtggacgaagcgagtccctggcaggtcgtcgtccatgcagatccagcacgactgcaggcgggtagttcaatcagcaaggtcgtctggtcaggcttgcgcaggcgactgaccttgtgctcgaggtcgtccaccgtccgcacgaccttcttggccggcgcaggccgcgtcgcctcgtcggcctctggcacgccacaagcgagcggtgagagctcgcgcgccttgcccttgtcggccgacgggataggcgagctctcgtcgaccttggagccggtcggcgacgctgctcctgctgctgtcgggtcggccgaggtcgagctggccagggcctcgtcatcgccactgaggtcgcctgagctagcgagactgccggccgcccgtcgttcagcagcctgcgcggcagctgctcggacttcgtcgcggccggacatgtcgagcgcgtcctgagagtagggcatcctgctgaggtccaggtgcgagatgaggagatgatactggtcgggcggcggcgcagcggacgcgacggagttggcctcgcccgctcgggcgtcgggtcgtctcttaacgtcgacctgctcgccgacttgcgcctctcgacatcgaccagctagccttccgtcgacgcactggccatgctcctcacgggcgagttcgagtgccgcttcccgtgatctccgcttcctctacttccccctggcccaatcatgacgacacgcccagaaattaatttcatgacgtctgctcttccatgtgcgcatccgttccagcggaaacaagaaagaaagcatggctggacccagacccctcggccgacaagaaaaacacccgaccgaccctgcagcgagcgactctacttggccgccggcttcttcttgaccacgagccccgggacgccgaggcctcctcttccaaccttcttcttctttgaccgcgccgcccccccaaaggccaacccgctgccgccgctggctgctgctctgcctgccgagccgggcggggcgagccccttctgtgccaggagtgtggcgagcgagggctcgttgccggtgtcatcgtcgagcttgcgcttgatcgatagcgtcttgggcggcttgggggctgaagaggtagaggcgtctggctcgccgccagcgtcggccgcatcggccgccttgtcgtcgtcgtcgtcgttgaccggcatggcccttcccttgcccttgcccttcacatcgaccgcagccgccgctgacgacgacgacggctcaggggcgtaagtcgggtcggggagcctcggaaaaagggcccggacgagcgcctcatcctcctcggcctcttcgagccgcgcgagctcggcttgcgtgagacgggccgcgaggtgggccggggtcatgaggacggagccggccgcgcgttcctggcgggcgttgccggtcctgattgaaggcggagccagaataagcgggtgagcgtgtcagtcagacggatgctctgtacgagggaaagagcggagaaagggaagtaaaagaacgaaccgaatatcctggagcacgtcgagaatctcgatctcgcgctttgagctttccatactgctctcgagcactttcatcgcgtcctgctcggcctcgcgcttctccttcccttcctcgtcctcgtcgtccttgccggcgccggggacgtacgaggccgaggcgtgggcgtcggtgtcgtcgcgccatgactgaaagcaagcgaaaagggaagcacacgtcaaagggggttaacgcaaggtccagcaaggaaggcgcgagcccctcttcgagctgcccaaaacgagggcgcacctcaacgttgcgcgaggctccctgctcgcagatgtagtctgcgtttttcgggtccgtcttgaacgtgatctcggtcgagcagagcgtgcacttgatgtagaagcggaagatctggcggtcgccgaatcacagatagggcgagcgagcgcaaacggaccaagagggatgaactgcagcgtggtcagcctcaggtccgggtctgccagcagcacgcggacggcagcgagcggcagggtggcgcaccttgatccccatgtagtcctcgccctcggccgtctccttccgggcgttgaacttcttgcccctgtatatgtactcgccgcagctgttgcagcgcatcgaaaagggcgccaccagggtgataatctgctgctggacgttatccttgagcttgcggcgcgggatcttggccgggtcgaagtctggcgggtcggtccgtggacagggtcagcggcagggcgcagcgcgagatgtgagcgggtgagagagacgacacacccggcgggaagtacttgttaaggacctagatagggagaggagcgcatgcatgccgtataagccggtctgacaagagctttcgcgaacggagcagaatagcgagggaggtgcggacggaccttgcgttcagacatggtggcggcggcggcggcggccgctggggtggaaggcgcgttgggccggtggagggagtcggacgaggacgggtcgggctacttctgctgacgattcgggagacgtgctgtagacggctgcgctgctaacagtcggctcgagggtccaggtgcgagccaaaggcagggaccgacattgatgatgctggtcgggcggcggcgcagcggacgcgacggagttggcctcgcccgctcgggcgtcgggtcgtctcttaacgtcgacctgctcgccgacttgcgcctctcgacatcgaccagctagccttccgtcgacacgcagactgcccttcgccctgcacgtggcatccaggacgggagtgccatggagtactcggtcgagccgctctcgcccgaggccaacgaggcggccttaaccgccatcaaggccgaccctggccagtggttcagcaagctcctgcctcggcgcctggccgaagacggaggaccggtgcatcagaccgagactgtaaactgcgaagcgtcttgctgaccggcgctctccgctccgcggccgcagttcgtctgtctcgtccagatgcagacgaaggaagaccgcgtcggcgacgtcgtgcgtcgcgtcgcatgctcgccgctctgtcgtgcggtgctgactgcaggcactggctctccccagatcgagttcatgacggccgtgcatgaagaaacggacgaggtgcgcccgccccgacgaggcgtcgtgcctgccgacgggcggcagctgacagctgaaataacgtaacgcccggcatgcgtctctccctccttgctcgcagaaggagctcaatggtgagcagtcctaaacgacctgataagtgcgctcttgatgctgattgtgcttcgacggcagtctactcccaccgcatcctccagggcaagtgggaggtcgaccagttccaccttgccctcatcatcgagtgtcagtcgctgctcagtctgtgcaggcctcgtgtccgcttcactaactgactgacaatctcgaacatccagatgacgagcctcaggccttctacgaccactacaagggccagaacatcgtcgtccgtctcgccctcctcgttggaaaccgttgccgtcgactgacatgtgcgcttgtcgggtgacagaccttctacagcgcagacgccctcgtcgctccgccccggctctccttctatcgagactacgcctaggcgagctcgtcggctgtcatctcgagcccttcatgtcgatgcctctctaggccgacctcgcctcatcctcgcccaatcgacaccgccggccaacaactcagcgtccacttagcttctcagcttgtacctgcaggagcttcctgcatgcagcggctgactcgacagactgatcgatgatatgtagttattgtacaggagcgtcatcggcccaaggcgagaccgggaccggtgtcgagtcggccgccgaaaggttgctccgcagactgcggttcgagcctttcttcaacgggatccgcttgctcggggacgatagtcccatcgaagcgaccatctcacggaggacacggcagtcctcctcgacgacttggacggtttgccgcatgatttcacgttcgcgccgggcctcggtcgcctcgtcctcgagcgtcgctgcccgctggcgctcctcggcgacaagcaagttggcttcctcaaacagctggccggtcaggtcctcgagctcgccctcgagcgatgctttcgagtccttgacggccgccaattccttggcgagcgaggtcgacagcgtgtgagcctcggcgagcgacgtcttgagagcggcgaccgctgcagcctgcgacgaatcggccgccgacgtcgactgcgagggaccgtgggagcggatgtgggcggccgattcgagggcgccatggaggttcggcgtcgacccggcagcggcgagctggccgagagccgagcgagggatctcactcccgccgacgacaccagcgcgcccgccaggcgaggccgacttggcagactcgctctgtgagggcgagaagccccacttgctgagccaacctccggtcggggctgatccgcccggcgagggtggcggcccgcctggcgacggctccgtctgagtccgcgttcgtgtcgatgaatctgagatcgagcggtccagcggcgggagcgagagctggacaggcgacgacaggcctgcgggcgtgttcgacgtcgggattgccaagggtggcggtgggccggccttgcgctgcgactgctgcttcatggcctggctgctcagcgttacaccgtccagaggtcagcgtcagggactgcggtacgctcgagtgacatggcgcacgcacccaaactgcccgccgcgacggatcgactcctcaagcatctcgacattggcctcggtgagcatgaggtttgagcctgcaagccgaaagcgagcgagtgaggtcctgcaagcggccgtcaggacagcagtcatccaaagcagacgtacgagcaatcttgagctcgtgctccgtctcaagctggcgtgagagagcggcatggaggcgcgtcgtctgcgcaggtccaagccagggtcagcttggatgagacctctccagtctgcccaccgaccggagcgaacgcaccaagccctcgacgtggaataaaagctcgccgagcgcccgacggacttcctccttgtcaaagccttgccgccatgggctgctgccgtcgtccgggccggcctcgtcgtcggcgacgacgccaaacgagtgctcgtcggcggcctcgagcgcgtgcgcgtggtcgtcctcgagcgagcgatgcagccgcttgaacggctgcaggtcaaagctgatggacgacgctcggttgcggccacagacggccggcgcatgggtcgcatcgaaggcaaaggcgggccctgctggcggtgtgctcggtctgggcaggtcgctcgctgacgacggaggcaaggtcggagggaggtcgatcgctgtagttgctgctgctgtcgctgctgcgacgggtagagaagcagcagcagccgctgatggcgagctgggcgaggagggcgagtctctgtcggtcatcgagccatggcctggctggaagtcgaaacttggggagcaggagatgatggttggccgacgctgctcgtcgctgacgcaaggcgaggtcggcctgccccgcacttcttgtcttccccgcgaggaccgactgaagtcgtcgtagctgcctgtgcaccgccgacctgttgcttgttacaaggaaaatttcttggttacagtctattgagtcttacagcttgagtgagagagagagagagggaaggggaagagcgaggaccggagctgctgcgaaactggagcgtgagggcgatgatgacgattgagtgaagaaagcaacatgcgaagggagcgagattcatgaggcccaaaatggacagagaaagaaaaaagacggaaggtcatcgaagctcgaacgagttgagctcaaagacgacgtcgggctggtcgggctggtagtactcctgcggcggggtaaacgagtcggccaagagcccgtcgtacgagccgtcggccgcgccgccagcgaagatgccgtcggcgtagtgtccctcgctgccttgcgggctcggctcaggatcgtcgccataactgaaggacgactcttcctgcagctcctggctgtagtgcgccgggagggccgacggctggagaggctgcggcggcaggaggtcgtgcggcgacgagtcaacctggccgccatagtacggagggatgtcgagctggccggcgccgtacgtcgagtgttcaggcagggcgccgccaaagtttggaagcgagcctcgccggccggggtggtacgcatcgtcgaaggacgggtcctgctgcaagccaaaagacgccgagggcacgaagcggccggtgttcgagggcgagtggtgcgccgaccgaggtccgcctttgccgctgccgaggccctcagtcacgagctggaggttgctaaactggaggagaggcacgctgccccgccgggcctggtgatatgcggcgacacccggctgcggccggccgtaaggcggaccgaggcgaccgccgctgccagttgactgagcgagccgcggtccgtcggcgtcgaaatcgtcggccgtcgggtcggtcggcatggcgtagggtacgctgccccgtcgcccgagaccgccgagcacgctgtggtcgattgatcctcgccgacgggcgttgcgctcgggtccgacgccgcccgacggcgttgccgaaagtcggctagaagtctggccatggatgcctaagtaatttgctggaggtggtggtggcgggtaggttctgtagccgagcgactgcggcggctggtttaggggcgagtgctgataggatgcttggccgcgatgcggcggagggtacgtcgggtacgagggcagtgccggagccgggccgtaggacggcacgtgcggattgctgtgaaagggagccgacaacggcaccgacgagcgctcagccgtgttcggcgacgacgtcggcgtcgtagaggctggaatcggcgcaggcggcgtcgtcgacgaagtggcggtctcagcagcagcagcagcagcggccgcggcagcacgggcccgcgccgccgtcatccccgacgacgagtacgtccgcgtgtcggccagcgttggcggcgggtcgccgttctcggccgccttcttggccatgttcttgagcttggcgcgtctatgaagggcgagcgagaggagcgagtcagcgcaaccgagcacatgcgcgtcttcaagtggccgacgcacctgttctggaaccagacctgaaccgcccgtgggctcatgtcgagcttgctgccgagctccttgcgttcaacggccgtcggtttggggttgacgacgaacgtgtcctcgagcatctcgagctgaatgcgagtcgtccgccggcggtgcttgatctgtcgtcgaggtcaaaggcttgtcgtcagcgcctgacgaaggatgaccagggaggaacagaaagcgagacgcacctcgacttggccgtcgtctgctccgccaccgtctgcgatatcaccatcggcgccggctgagctgactgactcctcgttgctgctctgcttcggtccaagcgagggccgcgcagagccgttggccgagctcgcggccgaattcgggctcgggcccgaccaaccctggacgtcgagctcgtctggcggcgctgccgagggtgcggccgcagcacccgacgacgaccaggccgagtgaggactcgcccgggtcagcggtccgtggttaccgccactgaggctgccagcgggactcagccgctcgctcttgaccggaggagtggcggtcgaacgcacgcccggcgcggccggagggccagcaggccgcgcttgcgggctcggttgaaggtatggcagcctgtcgtcgctcgcaggcggaggtgccgtgagcgaggtgcccgggacgtcctgggtcggaccggccgggaggaaggcgtacgagaaggacgtccctccgaatgggtcgatcgccgggtcgaggtcgggctccgagtgctcggggaacgccggccggtagcgcggccgctggaagggctgctcgggcgagaccgcttgaaattgcaagggtcgagaagaaggaggttgcctcgggcgagacgaggacgacggctccgacggttggccatggacgaccggcggcgcgtagatcgcctgcgcctgcgcggcgccgtacatcggcggcggcggagcgtgggccgcctgctgctgctgctgctgctgctgctgcgagtagccgtatgggtagccataggccgtgtaggctgtcggccgctgggccgcttgctggtggtggccgtacgggaggtaattcgggtggtgaggtgcggacggcgggtgggcgagcatggagcctcctcctccgaacgaagagtggccggcggcggcgtctgacaggcgggcgtaggcggcgaccggcgacgacgacgaggctaccatgcaaacgagggattgcagcggctcgctttcagcggcggcggacgaggcgtcccggcagattttggactggtcggaaaaaagctgaccagcgaggacgtgggctgaagaggaaggcggacggccgggtcggggagagagacggagagagaggcgacgcggctgcggggacgatctgcgatcgagcgcgcgcgaagggccgatgatcgttccgtcgacaggcgagcccgagagcgccggtatgtgtgtgagagagagggagagagagaagcgattgcttgcttgctgggagaatcccttacgaggtcctgtcggtggggaaggaagggaaagaggaggacgcacgacggcggcttggaaagagcttcagagcgtcggcccgccgttcagccaccagaatcgaccctggaagaacgcctcggcagccaagggtccaggctctggcgacggcgacggcgagggcctcgaacttcgtgccgcaaacgtcagcagcgtcgtcggaggcagcacgggcgcgagcagcagcacgtgcaccgagcgagggaagaggcagttacaggctgggctgacagctgagtagctgctgctgctgcagcagcagcagcgactgacgaccatcagcaagctcacccttacaccctttgctccgctcgctcgacttcgtgtgcgtgcgtgcgtgacccttccctgctaccccgactgatggctcgccgacgcctcggctgacatcgtgctcgcccttcgctgtccacgactcgtgggtcccaacctgtcggacacgcctgacctcgaacacaactcccagaactccatcgtccacatccatctgccagccagcaagatgttcgcctcctcgtccgccggcgccgcaacaggctcgacgttcactagcctcgtcgctcggcgctcgccggcgacaggcgctccttctgcccgatgtctccttgcgacgacgacaagccaagcgcgcctcactgctcggccgacaacgccggcgacctgccggacacgcctgcagatcgtcgcctcgcgaccggtcttccaagccagcctcctcagcaggtcatttgcctcgacgtctccttcgccgccactgggaggaggcggcctgccgcccaatccaccgagaccagcagcgacgacggtccagcccatctcgccgaccgacccggccgcccttcctgagctctcagcctcgtcgccgctcaaaagcgtcgtcccgcccaagcgacggtcgctcttcaagcgactgctcaaggcgacgctctggctcaactttggcggcttcatgcttgtcgtcctcggcggaggaagcctctggtgagtgccgacctccaccacctgtgctgcatgtcgaactgaatcccgtccgtctccctaggctctactacagctacattgcgcccgccaagacgatctaccggcgcggccgggatgggctgacttatgctgttgtgcgttgcctctaacgacccgtgccggccgtcgtagtgctgactcctatctcatctggcttggctcattcagggcgcctacgacacaaccaagtcgtggtactcgtggtcgcgcggctggtacggctatctcttcctcggcgagcggggctcaaccgaggacgccgccggccggggcgacgaggtcgtcgacgtccgaggcaagtgacagcgatgcactcactgctcgttcaccactgtaaccaactcttgctgtatcccgttgctttcgatggatgtatctctcttgcacgaatcttgggaggaagatggccgggacagagacggacaattccggcagcactccgggcgtgctgctgcgcctcgcccagcagcgacctcagcttcgaagcggcgcgcatccttggcgtacgaccaccattaacggacgacccgactcgaccgagctcaggcctcagtgcccgccagtagcgaccgtctctgccgctctcgtacgagcgagcgccgccctaggtaattccgcagggccgtccgagccgcctcgccatgccgtcgtcggttgggtccgacctcgaccgtcagctccaagccgacgaggacgccctccagctcgagctcatccggcaggacccaccggcctacttcacgctgccacagcagctcgtccacgagggaggagctttcgtcatgatcgccatcgtcctggcgcgggagggttgcggcacggaggtggtgcgccgcaatagcagcctctcctgttgattcagcaccgctgctgacgagctctgctatcgcctttgactgctgcctctggatcgcacaggagaagcgcctgcataagatccacgaggaagcggatgcagtacgtcctgatcgttgagcaggacgcggccacttatcgagccaggctgacgtcgacgccattgcccttcccgcgcgcagctcgagttcgatggtgcgcggccgaccgatgatctgcgtgtagacgacgacgctgacttttctcgcttctctaccacgccgtcgtgcagtctactcgcaccgcatgctccgaggtctgacggaggaggagcgcgagaagtgcgtcgccctctcgatgtcgcggtcgaccacaacccttccagactgactaagccatctgctcgtccgtcctccttcctggacgccttcagcgagttcggtcagtccgtcttccactcgataggccctttgatacgatggctgactatgtttcgacccggtgcgacctctccagccgtcataatggagttcaacgaaccgggagctgcagtgcggcacttcaacggagacggctttggcgtgggtcgtcctctttcatcccgctgtacaaggtcggcttcgctgacgctagatgctctcgccgcctgacagcaactgatgcggtcgaatcttctcgccgccccaccaaaacacacgttcttccggagcaccgagtagaagctgggagcaggtgtaacgatcgtgagagaggatgaaggggggtccagtccggcagccactttgtatccaatcgtaatgtcataagtttcgttgaccgtctcgtcccagtcgcctacgtcgccgttcccggggagacgctcgtggtacccgggggacttgagttgcggcgctcatcgcctggccgagcgattcgccgttcgccgccaccacctccaaagacgagctcaggccccaaaccgaccggcgccggtcgcgggtctgtcgagcggcgcgagagacccgcgtaggcgcgctcgacgtccgattcggcctgcgccggcgaggatgccgcactccaagaaatctcgggcgaccgcagcgagtcgaggtagcccgattcgctttcggcgtcgtcatctgcgccgactcgcgagcgcgggccgcgatcgtcccctgccgcggcctgcaagcgcagggctcgaccggagagagcgtgggtcggcgttgcggtcgcataggaggagcctgccccgccaaacgtcgattgagtctgcgcgctgaggacgttccgctgctgacggggcgtcacgccggcgcttcgcagatgcgacccgtcgtttgtcgccgtcccgccagcaccgccggtcgagacggccgacgagccagacaaccgcaagccaggggaaggcgagactgggtccaggtcttctggcgtagcagacgggatctcggccgcggcctgcgagtagttgcgccggtgcttgccggcgatccagccgccccttcgatggttgtcggccgccttcttgaccggggtcgagcccaggccggtgggaccgccgctaccagacaggctgtagtcggcgcttccctgcgtgcgagctcgcgtcgctgcgccgaccgaacgaaggaggctctcgagcccggcgcggacgccgtgaccgtcgctcgacgtcgtcctggcatgcgactcgagcccgcctgtgacgtccggatcggactgggtgagaaggacgagggccatctgctgcaggcgggcgaggtgcgccggtgagggcagtgggtgaggcggagccaggagaggcaaaatccgtggcagatgcgggtgaaggagcgagacgaggaagagcgtgagaaggtgcagccgggcgtcgatcgcatgcgtcgaggccggttgagaatcgtcgtcgtcaccaccgggtgctgctgctcgttcgacggcgaccgcctcgacgattcgagggtcgagcgttagagggaggaagatgccctcgacgtaagggacaacagtcgtccagaagaagacccagacttcgacgagtcggctaacgagccggtcgtcgtcgtcgaccgcgtgcagcttggcctcgagcgtgagcatgcccgagccgagaatgtcgcgcaggtcggctgtcagcgtcgcgaggacacgggccggcgacgagtagcgagcaaaggtcgccgtgatgtgcgacgtcacgagtgcgttcagcgactcgatcgggttgcggagggcgttgccgttgaagcacggtaggacgtgcaggaagaggctggacagggccgaggtcgctgaagcaaaggatcgacgacagtcagctctggtcaaagacacaggaactgccagcagctcggagcgtacgatgcgacggatgagggaactgcgcgccggcgcctgagggatcgggtgccgggtgcgggttctgcgacgtcggcagcgacggcagaggcggcagggtgtcaaagctattgaagatggctttggcgtcgtaggcagagaccgaggcccgtgtcggcaggtggttgtgagcagggtgcccgccagctcctccgaggtacaagccggccgtcgacgaggcgagcaacggaacggccgaccgaggcagcgccggcaccttgaaggtcgggccgtcatgaggaggcccgactggcagatgctgctgctgatgctgcgccatctaggacgccgactatgctgctgccgcctgctgcttgatgagaagattaaaggtcgaggtcgaggtcaagggagggacgcagtcgagatggtcgagctcgcgtccctcgccctccgaccatcaacctgtcatccaaccctttgcccgcgctccataacttcagcgcccattcctggaccaccttctgagcagacgaccagcccttcgccaccggcgtatatcagctcagctcagctcagctcagctcaaaaggacgtgatcggctggactcgaggcgacgttaacgagccaacacctcgcctcgcacggccggacgcgacgagctcaaccgcccaggtacgttcgactgctcatgagctcagccgctgtcagtgcgactcgctgatcctgtcccggcgccttctaccaggccactctcttctccctcctcagtgtcctggattcgccatgaaccaggtcgggacgaacaagggacctgacgccgccggtgcgtgcacgccctccccacgacgcgccgagcacttgtgcttctcgtcttagcctacaagcagcctccggaaccttgctgaccagcacgacctatctggcccgggctcactccagcgcgcgcactgttgcccggatcgtcgaaccggcttatcctctcgcttctttcgggcgtcgagtcagacgtcgactgggcgctgcgcgacctgctcaagtactcggcacacaacaccgagcgcctgacactctcggtctgggttcacgcggtcgacgcgctactcacttggccgcaccggctgattgagctcgcacaggagtgcagtcggtggggtgaggcaggctgggagctccgcggcgaagccggcgaggcgacgcagcggcgggcgagcgagagtctcatcatcctacgcaacgccggcttcaacgagaaggccaacggcaagctgctcggctcgagcagccggctcgccgactttcttgaggccttctttgcgctcgactcgggcatcctccttgaccatctggccgagcaggctctcctggcgctcgacatcctcgacgcgcttctggcatcgtcgaccttcaagatccgaccagactcggtcatcccgctggcgctcgtcccgctcttccggtcgcgagaccgggcaatgctcctcgccgcatcgcgcatcacattcagcctcacctccccatcctactcgcgcccgccgaccctgccggcctcgcacccaatcgtcgctcctgccctcgagtcggcgatccacctcctgctccttcccaaggcgccggccgatcggctcctgcgcacggctgcgctcgacctgatctaccaacacacgacagacccggcggctgccgccagcaacgtcctgcgccgaccggacgtcgggccgatcgtacgcctgctcgcacagggcctctacgacgactcgagccggagcatccagccggtctacctccacccgcgcgaccggattggcatcatcgatgtccgcttccggccgctcttgacggcgccggtcgacccggacgagtggcttccgagtcctcaggagctcgacgttctgacaatgatgccggagcccgaccgttgcacgcgctggtgcgacccgcatccttccgcctgttcgtctcgcttaagtcgaatcgctgacgtaggactcatgtgcgacgctttcgcaggatcacccgttccttcaagcgcgacccgcatggtaaggtcacgcagacggccttctggtcggcctaccgcgttgcgttcaccgaccgcgccgcccagctcagcgggccccagctgatgaatgcgtccgaggtcatcaagattgtgagcgagattgttcctggcgcgtcggcgagcgtcgagcccaacccggagaacccgtcggccaaggtctttctcatcaagggcatccgcgagcgcaagcgtgcgtccgcctatggtccacgtgtgtcttccttatcacgccctgaccgccacccgtccctgtcgtctctcccctactagccttcccgaccgagccggagccaaatccgctgctgtcaacgtccttcccgcgcctgcatgcccgcgtcggcccgcagacgcaagcggccgagggcaacgctttaacgtgcgccctgacgctgcgcaacctttcgcgggccgtcgtcgacctgctcgacctccacgaggacggcgacgacagcggagaggctgctgatgccgaggtcggcgagaagcgggtaggcgggacggacgagggtcggcaaggcaggcggaagcgggccaagctccagaacggcgagctgttcggtcttccaatccccgaatccctcaagtacgccggccagggccaaaacgcaccggtcgccggcagtgcaggcgacacctcagcgaacgtaggcgatgacgaagccgatgccggtgcggctgcggtggcagcgacggcgtcggacgaggtccgactgagtgcggccgaggcggcacgggtccggaacgcgttcggcagcgcggtcgaggcgagcgtacttgagtgggtgaccgaggaggacaagctggcgccctatttgaccgaggtcaggaccctttgagacaccctctcggtggcttccgtcgtgactgactccctcccgtctgtgctctgctgcaggtgctcgagtgcatcacgctcctcggccggttgccctgacgccggcgtgcgtctctcttccttgtatacaatgcgggtctcgtgtgcatctttggcgactttgcgcggtcagtgagtgcaaggagggcgtacataaggtgggcgtgtgatctgggagaggtcctctctgcatcggagtagaacagacgagcctgaggcaggttcgatattgtagacgacagaagcggagatactacgtagcgagcatgtccagtctgcgccactaccgtcgtcctcgccggcgcttcacaccgaactcgaccctcccagtgtgcttactttaaggtcggttcgcgcggtcgccagatgagattttgtcatcttcccaagtcaaatcgggcttaagcccagatgacccccgctcgatcgcccctctctccgcgcgcagcctctcgcccgcccggtcgcacgcaaggtcgaacttgggccggctctcctctgttgccgctcgctacggtcatcaaggcaagcccagcccccccttgcctgtcagggggtcgagcagaatcgccgcagcagcagcccttccgtccctagcaggaggtcctaccctatcgccttcaggtccaatcgctgtcgtcttcgtccagcgccctcaacagggagcattgcagcagcagcagcgcggggcaggagcaggtcaagggactttggctcgagctcgagctagtgtccccatgccctgtccctggctcgccaggagctcggacgagcaggaggaagacgagcgctctgctcgcccgggttgggagggagaggaacagctgctgctgctctgctgggacgacactcgacgacggctgggacctgtcagctcgggagacctgcagcctggggtcgaacgaaggcagcctgcgcgaggcttctcgaccctcgccgctcttcccgaaccctgtcggctaacctccaccccgttcctcttctcagatgggaatttcacgagactctcgccacaagcgttcggcttcgggcgcgaagcgtgccttctaccgcaagaagagaaagttcgagctcggacggcagggtgcgctcgtctgcatttgggtcgactccgtacacgctcggtcgctgacatcctcgtttccgcccgctcacagctgccagcaccaagattggtgccaagcgcatccacaccgttcgtgtccgcggtggcaacctcaagcaccgcgctcttcggctcgactcgggcaactttgcttggggctcggagcactgcacgaagaagacgcgtatcgtaggcgtccagtacaacgcctcgaacaacgagctcgtccggaccaacacgctcgtcaagggctcgatcatccagatcgacgccacgcccttccggcagtggtacgagacgcacgttagtctccccgtcgtcgtggcatccccccgcaacatggccgctgacaacctgccctcttccttccgcgccacagtacgctcagcccctctcggctaagacggccaagatgaccgagaagccggcggaggaggtcaagctctcgaacaacgtcacccgcaagctcgccgagcgcaagaaggaggccaagctcgacccggactttgccaagcagttcgcgaccggcaaggtcctcgccatgctctcgtcgcgccccggccagtctggccgcgccgacggctacatcctcgagggtgccgagttccagttctacctcaagcgcatcatgagcggcaagaactcgaaggcctaataggctgcctgtgctctcgcgatgaaacgacctgtccccatgacttcccttctgctctgctttgcgaaagtcggccccatgggggtacaagagggcgggcttgggctcgcacaggccgcgcactgcgtgaagtatgacgtcgcccagcgctcgcttgaggtagaactggaactcggcaccctcgaggatgtagccgtcggcgcggccagactggccggggcgcgacgagagcatggcgaggaccttgccggtcgcgaactgcttggcaaagtccgggtcgagcttggcctccttgcgctcggcgagcttgcgagtgacgttcgagcacgagctgcgctgggagcgctcttgtgtgccgtccagtcagcattgactggtccgtctgtcgaaggaccgttgggctcatgctccatgctcgtcggcctaacagtcccattctcggtggacgtctcgtgatcagtcagaattgatacattgcatcgctcgtcaagagaggcaggcggtcacatgtacatgctgccggcgtcgacctccttgcgcccccacctgttcttgcgcccgcccttgacaaagcgagcctcgtcccaggccgccgtctcgccgagctcctcgcggaggacgttcgcgagacgccggagtgtggcgagcgtcgggcgtggtgctggaagaaggaagagcggcgtcggcggctccgaaagagggaggagcgtgaggaaaggggcgaccgaggagaggaggtggttaggcggcgagaagggatgaagcccggtctgcagcgagaaggagcagcaattcaagttcagccaggatcctaatatgatctggaaaggaggtggccgcacggcaggcttatacgcggaggacgttgcgaggaagcgcagccgttcctcgccgtcgctgtcgtcctcggctagcgtccgcgtcgcctcctcttcagccgagggcaggtacgagctcgcaatgtacgagtcgagcgcaaccaccctgatcgtaggatgcgaccgagaatgcgtcagtacgtgggacacgaggacgcatctggatacacgacagacgaaccgcgcgggcgagatggtgtcgagcacagcaagggcgataggcgatggcagtgcgtgcggcagctcgggcttgagcacgaggacgacgaggtcgggtccgatggtcgacagcagcccgacctgcggccacaacgagatgagatgagcaagcggtcagcgccggcgctctctccggcctgctttcggccggagctggattgaaggcgacgtacgatctcctcctttacgccgtcgacccggacgacctcgcccgcatcctgaccgtcatagccgtcgacgaacttgccggcggcctctcctccgaggacgagaagcgtcgcgctgtcgcgctcactctgccagccggtgatgcggagctcgaccggccccggcttggtccgctgccggcggctcgagtgcgggagcgggaaggccgggtcgtcgtcctcttccgagtcggactcgagcgcgtgccggggcggcagggagctcagcgttgtcgggtcgtcggcggtgttcatggcgcgaaaagttgtgggcaaggtggtgaaagtaatggtcggcaggagcgaaggcgactcgtcatgactgccggcttgcgtcgagcctctcctccttgttgcccgcccatcacccctgtcgctcgtcgtcaggatgcaaaaggcctatcagctcctctctgcctatcgcagctacgacccagaagctgcacgcaagtcccgagcgtgagtcgtcgcggtctctctcagcctgcagcgtccggcgctgactgcggtcgacctggtgcacggccctatcctcccctcactgctactgcgtctcagcacccgcaaaaaccgctcgttcggggccttccagccgacctactacagccggaccgtccttcgccagccgcgctctgaccgagaggctcaggagtaagtggcctcgctgaccattgaaggacgttcgtgaacgatgcgcagcgctgacgacccacccaccgtctctgcttcgcaggctctacaatcacgcacgtgtccgtccaggagcgggctgtcccatcgcacgccgtcgactgagcttacattatctcttgacagacggtctgctttgtcctcgacgactctccggccctcgccgactttggcctgccgttcaaggtcatatcgccgttcgtctgcgctcgggccgctagagcagtactaacgacccgcgcggccttccttctctcaggccggcctggacgacattgtgtcgcttgttccactctgtcggtgccaattctgcttcctgcagatctgtttgctcctgacacaacctccgctccgtcgcaatcgacgttccagacggcgacgccatttccgcgctctttggcctctacttcctctacctcgccttcctcttcggctgcccgtggccgacgctcggatggatgctcgctaacgtcgtcgtcgtgcgtctcgcagcgctgcgtcctgcgccagagtatttgtcgctgactccagctgccgacaccttcaggacttcctcgtcggcattgtcccgtgcgcctcggactttctcgctgcacttatgattcacgttggccgctgacgttctttgcgcccttcactctccaaggatccttggcgacattctcgacaaccttttcaagtcgaatctccgcaacctcgcgctcctcgaggaccacctcctgcggcagaagcggcacacgatcctcctcatgcccaagggcggcgccttcctccccaagccggcgtcggcgaagcgatcgttctggggcagcgggaaggcaaaggaggaccggcgggcgccgaaggccgaccggtcgcggcggatggaagcctgggagggcgaggcgcctgcgcaggacgacctcgactagggtcgcgaccgtcaaccggtccatcgaccttctcttctggacgcatgcgtcgttgcgttgatcttcccggacagtctcgccgacagatcattgagtttcgatcgcccttagcgtggtcgtcggacgcgcgccgtttctctcctccccaacgtcccgctcgaccaaccaaatccttctttcttgttcggtcagccagttatagaggagagagtacggcaggcagccgccatacgagttctcagtctgccgccaacgacggtcttctcaacttctctcctcacccggccgtctcacctcgcacgacgacgtcgcccggagctcgacctcagccccagacccaacatcaaccgtccgcccagctctgacgcctcctcggtcccgagatgggcctctctaccgccgtactcgggcacacgacagaattaatggctgtcttggacagccgcagctcgcccttgctcgcctcaaccgaggcagccgcagccgaagccgcagcggccatcgccgacaacagcctgctgccgttcctcccgcgctggctcaagctcgtgctcctgctcgtctttatccttaatgctcgctcgctgcccggcatctggcacgcccgcatctggtggcacgccctcgtgccgcaccttcagtcaaaatggcgcggcatgctccctcacctccgcatccagcacgagagcaacggctcggacccgctccggctcaaaagcacgcgacacctttgggccgggccggatgactgcgactgtgagcgcccaacctgccgctcaagcttcctcgagaactcgctgacacctctgtcgagctgccttcgtgtctgtccaagtcaacctgcatctctccaactcgtgctacgctaagcactgcgacgcctcgcgcatgaaggtcggttccctcggatccaccagaggcaccctgatgcaagtgactgacatcctgggctctttgcaggccattgtcgactggttcgggccgtttctgatcgtcggcggctgggccggtctcgccggcgcccactacgtctttccgcgcgaaatcaaggcacttgcgacatacgacatcgagttgtgcggccctcttgattccctcctccttctcgccgctcattgctgacctgcttcgacctggctcgccgcagcaccattggcgggtacggcgacaagtggatctacatcacgggcaccttcgtcggcggacctgacaaccggaggccgtcgtcgtcgtcgtcgtcatcgagcgttgacgtcgacgcaggcttccgagcgagcctcggcaagccgataaaggagggtcaagcctcgctcgacgtccctctgctctcgccgacctcgcctggcagcagcagcggcaatgcgacgccgctgccgcgacgagaggacggccggatcgtccactgcgtttcggtcagccagtactgtgcgtcgcttcgtcggccgatgagggaaggggagcttacgaacaaatcgagctgaccctcttgaacgccctgcaggcttcaagctcggccggctgacgatcccgcccgcggtcgtcctcgccttttgcggctacggcgcgcgcaccaactgggagcgctttgagcggctctaccggcaaggcccgcgggcgatgaaggactggctgaggtcgggctggcgggcccacccggacgtcggccgcgacgagtacgacgcggttggccggctccgcgggcgtaaaggcgaggacatgcaccagctgctggccgcctttgggacgcagtagcgctgtagacgacacacccaggaaactcttctccctcgacatggactcttgttggcctctctctccctcttcttgcaatgcctacttgataattggcctgcgtcatgacgactgccgggccggccgaggcgagtcgtctcgatcattgttaggggtctgcctgtttagggctggcactcctgtcgaggcggccccggctactgtgcggatgccgacggccggacctcgctgacgaaactcgggcggcggtcttggctcgccgcaggccgacggagaaggctccgactctccgagctcgcccgagtcgtcagcccgtcgcccccttttcgcccttccttccctccgaacaaccacactcttcgccatgtcctctttcagcgacctccttacattgagcttcttgcccggttgggccaagggcgccctagtcgtccttctcgccttcaacatccggtcagttccgcagcccggtcgagctttcgctcgccgcagcgacatggcagctccaagagcagctcttgcagcttgccgagacgccgccgtcgaggagctcggcagatgttcagcaggcaggccactaacgtcgtccccgctgccttctcaacggctctgtacagctcctttccttttgtctggcatgctctcgtcctcgagcctgtcgtccgcctgcagctgcgcaagaaggaccccgaggccctcatccgcaacaccaagggccgcgacccgatgacgatccgcgaggtcatcaagggtttccgggctttcccttcagagtgcgactacaatatgcacaagtcgagtgcgtgtctagacgtgccgagatgccctgcaggcgccgaaccgacttgttatactggcgctcgcagactcgacctacgcggccgacatggacattgcgcgtagtaacgtgagcggtctttctactcgactctcctgtctggttgcacgtttgctgacagcacgcccgtctttcgctcttttctcttggcaggttgccgccgactggttcggcccgttcctcgcggtcggcggcatgctgcccatcgcggcgaccgcccaccagttcctcaacgagatcccgccaatgacagcttatgacgttgagatcagcaacggcggcttcggcgagaaatgggtgcggcctattcatcgcttgcaatcggccggcttgcgctgacgttctcgacgcaattgtacccggctgtcgccagtttttctgcgtcggcatcttcgtctcgtacccgaagaagaactcaaaacgccagccggccgtacccgagacgcccggcgtcgtctctggcacttcgtcgcctgcgccaggtcgcaaggccgcctcgactcggctagacggcggcctcgtccacacggtcgccgtttcgaccttctgctgcaagattggccggctgacgatcccgcccgccgtcgtcctctcggcctgcgcgtacgggaccgaggccgaccacgcgcgctacgtcgccctccagaaggctgggcctaaggcgatggtcaagtacctcaagggtggatggaaggaggaccccgaggcggtcgccgccgtcgagcgctttgccgcccagggcaaggccgccggcaaccagggcgaggccatgcgccggatcctcgagcagtacggcgccgacgcgccggcctcgtagcgtgcgggatggctgagaaaatggcccatgttagaggacccggagatcatgaactaaaggaaggatcagcaacatcgaatgtcttcttggctgccaacagtcgagggccggcagcggaagttgcgcaaggccgagcgacttgcgcaggaggcgagggaggcttatgatcggacgggctgacgcgttgaagcgctgactcgctcactcactgaccgacgatgcagaaagagagggggcgaggcgggcgtgagcggcccgacagcggcggtcagagtcgatctccgctgcttctgctgctgctgctgctgctgctgctgttgagcaaacgcgtccgactcgaaaggcagccttgagccagtcgaaggcgggccgagcccgagcccgagcgcgccgagctctgggttgaacccgagcggggggagagccgccggcgagggcaggcggggtggcttgatgggcgatggtgcgccgtctgcgtcgtctggtaggctggccatcgggaggagtcgggctgaagaggatgagggtgacttgcaaagggctgctgcgccggggcgggcatagagaaaggacgggctcaatgcacaaacacggccagcccgcgatgcatccagccaggttatccccctccgcctctcaccagcatcgcgcgtgcgcgccctccttctctcctctcctctctcacatcataccccgcctccctcgcccagccagagctacaagaggagcgaatctacccatcatggccgacaagcccatcagttagtccaccgttatccatgaccgctgtctcgagtctcagctctggccaccccgcccggatccaagccgcatgtgatggcgaggtcgctgacccttgagccgacccgtccttctgccctctctccagccttcgccgagcatctccaggtgcgtttttcctgcgttaccgaccggaggtagacatgagctacgtgggcggagctgaccgagtcttgtcctcctgcgatctcttcctgctcgctcctcgcccggcacgcgtccctcccctctccctcttttcctcgcctccgactgccgtcccgcacccgggcccattcccttcccgccgccatcgtaatggctgctgctgcactcgtgcccgtctgtccaccgtcatgccgtgtcgggtcattgctgtcgtctgctccgaaaacgcgggctttctctcgactcttcgccgctcgcctcgcccgggccctccgactccatcttccgacccctttgcgcctctccatcgaccctctctccttccgccacccccgcagctcacggcgctcggcatccagccggcgtccatctcattccagacgctcacgctcgagtccgactcgttcatctgcgtgcgcgaccaggccaacgtcgtcattgtcgaccttaacgacgccaatgccgttgtccgccggcccatcacggccgacagcgccctcatgcacccaaaggagaagattctcgctctcaaggctgggaggcagctccaggtgttcaacattgcgagcaagcagaagctcaaggcgcacctgatgaacgaggaggttgtcttttggaagtggatcaacaccgagacgctcggcgtcgtcaccgagagcgccgtcttccactgggacctcaacggcgccgaggcgcccgtcaaggtgcgtcacctgtcaccttggtgaacaacacaccgtcgcgcgcgcagactcgctgaccaccgcgtttctccctccctcgtgcgcgcgcgcggcaggtcttcgaccgcctgccttcgctcgccggctgccagatcatcaactaccgctcgacgccggacggaaagtggctcgtccttgtcggcatcggcgccaacaaggacccagccggcttcaaggtcaaagggtcgatgcagctctactcgcgcgagcgcaaagtcagccagccgatcgagggccatgccgcggcgttttcgagcttgaggctcgatggcgcgccggccgacagcaagctgttttcgtttgcggtccggacggcgacgggcgcaaaggttcgcgagcgccggccttgtccaaaagcgaaggcgcgatcccgttgctgaccctcgacccccctccttcgtgcccgcccgcagctgcacattgtcgagatcgaccacgccgcgcccaacccgccctttgccaagaaggccgtcgacgtctttttcccgcccgaagcggccaacgatttcccggttgcgatgcaaatctcgcagcggcacgggatcgtctacctcgtgaccaagtacggcttcatccacctgtacgacctcgagagcggcgcgtgcgtctacatgaaccgcatcagcggcgagacgattttcgcgacggccgagcacgagcagacaggcggcatcctcggcgttaaccgccagggccaggtgctgtcggtcgggatcgacgagcagaccgtcattccttacatcctgcgttcgccccctgcctcgctcgctcgttcgcactcgacagttcaagctgacgatccgtccctccctctcgctgcagagcacctcaacaacacggagctcgcgctcaagctcgcctcgcgcgccaacctccccggcgccgacgacctctacgtccagcagtaccgctcgctctttgcctccggcgactactcagcggctgccaagctcgcggcaggctcgccgcgcgggctcctccggacgccgcagacgatcgagcagttcaaggccgtccaggttgcgccgggcacgatgagcccgatcctccaatactttggcatcctgctcgagaagggcgagctgaaccaggtcgagacgctcgagctcgcccggccggtgctcgcccagggccggaaacagctactcgagaagtggctcaaggagaacaagctcgcgtgcagcgaggagctcggcgacatcgtccggtcgaccgacctcacgctcgccctctcggtctacctccgcgcaaatgtccccaacaaggtcgtcgcctgctttgccgagacgggacaattcgcaaagattgtcggtcctcgacgctcgaaccttgcttttccttcgcgctctgctgaccactgccttctctaccctgcccgccaggtcctctactcgaagaaagtcggctacacgcccgactacccgacgctcctccagcacattacgcgcctcaacccggagcagggcgcagagtttgcgtcatcgctcgtcaacgacgagtcgggcccgctggtcgacgtcgagcgggtcagtcccccgcagcacccgggattcctcgcgccgcgggttccgctgagacccttctctgtatcttgttcgcccaccaggttgtcgacatcttcatgggctccaacatgatccagcaggcgacgtcgttcctgcttgacgccctcaaggacaacaagcccgagcagggcccgctccagacgcggttgctcgagatgaacctcgtcaacgccccgcaggtcgccgaggcgatcctctcgaacgagatgttcacgcactatgaccggccgcgaatcgccaacctgtgcgagaaggccgggctcctccagaaggcgctcgagcactacgacgatctggccgacatccagcgcgtcgtcgtccacacgaacctccttccggccgagtttctcgtcggctactttgcgcgcctcacggtcgaccagtcgctcgcgtgccttgaggcgatgctcgagagcaacatccggcagaacctccaagtcgtcatccagattgcgacaaagtattctgacctgctcggcccgctccggctcgtcgagctctttgagaagcaccggacgtttgagggcctctactattacctcggctcggtcgtcaacctgagcgaggatcccgagatccactaccagtacatcgtcgcggccgcccggaccggccagctccgcgaggtcgagcgcatctgccgcgagtccaacgtctacaatccggagaaggtcaagaacttcctcaaggaggcccggctcgccgaccagctgccgcttatcattgtctgcgaccgcttcgacttcgtgcacgacctcatcctcttcctctaccagaacggcctgacggccgcgatcgagacgtacgtccagcgggtcaactctgcgcggacgccccaggtcgtcggcggcctgcttgacgtcgactgcgacgagggcacggtcaaggccctcctcgcgagcgtcacggggcccttcccggtcgaggagctcgtccgcgaggtcgaggagcgcaaccggctcaagctcatcctgccttttgtcgaggcccgcgttgcggccggcgaccaggatccggcgctgttcaacacgctcgcgaaaatctttgtcgattcgaacaacaacccggaaaagtttctcaaggagaacaacctgtacgagccgctcgccgtcggcaagtactgcgagaagcgcgacccgtacctcgcgtttatcgcgtttgcaaagggcttctgcgacgaggagctcatcgctatcaccaacagcaacgcaatgttcaagcaccaggcgcggtatctcgtcaagcgccggctgcccgacctttgggcccaggtgctcgccggcgacaacctccaccggcggcagcttgtcgaccaggtgattgcgacagccgtgcccgagtcgaccgacccggacgacgtttcggtcaccgtcaaggcgttcatcgacaatgacctccctggcgagctcgtcgagctccttgagaagatcatcctcgagccctcgccgttcagcgacaaccgggcgctccagaacctgctgctcctgacggcgatccgggccgacaagggcaaggttgtcggctacatccagaagctcgccaactatgacgccgacgagattgcgcggatcgcggtcgagcagggcctctacgaggaggcctttaccgtctacacaaagcatgagcagcacgcccaggcgatgaacgtcctcgtcgagcatgtcgcctcgctcgaccggggctcgcagtacgccgtcaaagtcgataagcctgaggtctggagtcggctcggcaaggctcagctcgacggcctccgcatcaaggacgccatcgactcgtacatcaaggctcaggacccggccaactttgccgaagtcattgagctcgccaacgccgccggcaagaacgacgacctcgtccgcttcctccagatggcccgcaagcacacgcgtgagcccaagatcgacaccgagctcgcctactcgtacgctaagacggaccggctgcacgacatggaggagttcctcgggacgaccaacgtcgccgacgtgctcgtcgtcggagagaagtgctttgacgacggcctctaccaggcctcgaaacttctcttccagtcgatctcaaactgggcgaggctcgcgacgaccctcatctacctcggcgagaaccagccggccgtcgatgccgcccgcaaggccggcaacactcagtgcgttctccgctttcacactccttgaccctcgacagctgacctccttcttgcgcgcacagggtctggaagcaggtcaacgccgcatgcatcgacaagaaggagttccggctcgcccagatctgcggcctcaacctcatcgtccatgccgaagagctgccggccttgctcgccctctacgagaagaatggctactttgacgaggtcatctcgctcatggaggccggcctcgggctcgagcgcgcccacatgggcatgtttaccgagctctcgatcctctacgcaaagtaccggcccgagaagcgtgcgttccccgctcgatctgctgcctatgatttgctgccctgctgacacgctccgctaccgccagtgatggagcaccttaagctcttctggagccggaccaacctgcccaaggtgatccgggcggccgagcaggcccacctctggtccgagctcgtcttcctttacgtcaaatacgacgagtttgacaatgctgcgctcgccatgatggagcgctcggccgacgcctgggaccacgcccgcttcaaagacgtcgtcgtccgcgtcgccaacgtcgagatctactacaaggtacgccccgcccgccgtcagccctctccccttcgctttcgtcagcagctgacgcaagcttttctgctgccaggccctcacattctacctccaggagcagccgctcctgctgacggacctgctcgtcgtcctgacgccccggatcgaccacgcccgcgtcgtccgcatgttccgtaaaaaggacaacgacaacctgccgctcatcaagaactacctggtcgcgatccagcacgtgcgtcgcccgactcgagtagactgggcgcggccgccgcggaccgctaacctgatctcgtcgccccctgcagctcgacattgccgaggtcaacgacgccatcaacgagctcctgatcgaggaggagcaggtgccgacgctccgcgacagcattctcaacgtacgtgtcgtcctccgttcttgctcgtcgcgcctggctgaagcctgctgacacccgttggccgccctcaccccttccagttctcgaactttgactcgatggcgctcgcccgccggctcgagcagcacgagctgctcgagttccgccggctggccgtcctgctctacaacaagaacaagaagtgggacgactcgattgcgctcagcaagcgcgacaagctcttccaggacgccattctgacggcggccgagtcgggcgaggaggaggtggccgaggaggtcctcacctactttgtcgacattggctccaaggagtgctttgccgctacgctcttcctctggtgcgtctcggttgctcgctcgctttggctctccgtctctgatccgcctccctttggatccctctcgtagcttcaacctgctccggcccgacatcgtccaggagctctcgtggatcaacggcctcaacgactatgccttcccgtaccagctccaggtcgcccgcgaccagacggtcaacctcggcaagctcaaggccgagatcgaggagctcaaggcggcccggccaaaggcgccggttgaggacggtcgtgagtccttcgcctctccctcttgccttctcctcccgactgacgctgaccttttctcgcggcccccgcagccatcctcgggcccggcttcaacaagacgctgatgatcaccggcggcggaccgggcatgccaccgccacaaccgttccctaacggcgccggcggccaggtgtatccgcaagcaaccggctggggcggcggcttctagagcgcggggctcgagcctgcgcgtcggcgacccctcttctgccgtttccggtttctctgtgcctctcgctgcctgccttctttgatcaatgctgtctttctatcttctgtgcgcgtgtcgagggcggtcgacgcccgcgcaagtcgtgagcaggtgtcgctaccatgggattctagcgggacaagaggggccaaagaggagggggagtgatgtgtagccgataactgccgcgcaccggcgcggcgcggagcgtgatgatgagggtaggccggcagagtgaggacagggacgtcgacggatgcagtggcgggcgtgcagtcgttaaaatgagctcgaagggcagttgagcgtcaagccttgccctccgtttccgagtcgatgtcccagtccaagccaaactcttcgtcagaagtcgcatcgtcgacgaagctgtcgtcgtcgtcgtcctaaactgccgagtaaggaagtcaggacacgcagtgcttccggagcagatgtcgatcagagactgacacgactcgtcaacggacggggcggggacgtcgacccaccaatgctcggggaagggcacgaatgctgaaaggggttggagaggccgtcagctaaagtttaagcggtgcacgctcgagggagggggagggagacacacgtatctgctgcgggcggtccatctgccagcgccggccgacgtccttacggatcgcaggctcgcagatgagcatgtggcctgggtcctcgtcgccggggcacgagaccgagagcggccggcggatcatcgtccccgggtcctgggcacccagcacgagcctctgaccccaggtttgcaagtcgcgatcgggcttggcttcggtggtcttctcgtcctcgtaatatcacttggtcctggcgatcgcgctccgggcccgaaagacgtcgccgaccgagacgacctttgagcctggggtcataaagtcgcaaggaggcgagggcgccgttgcgtcggcaaggctgactcgaaggacggcgtctgcgaccgccggcgaggtcgcggattcgtgcagagcctgttggctagcgagcgcgatcggccgagcaagcttctgccccgcgctgttgcggacgaccatcagctgggcgaacgaggccgtccgctgccagtcgacgcaggcaaaaagcgggtgaagcttgagccgggccgacgctgcgatgccatggtaatcgacctggcggaagatgtcgacgagctccttcttgtcggcgtgcgtctccttgaagcgcagtcgggcgaccttcgggttgacgacgatgaccttgcggacgaggcggtagaagccgcgactgcaagcctcaagcgacttgcagctgccgtagtcgagtgcggcaaggacgagcgcccagaccgaggacggcagcttcacgacgtaaagctccgtcgtcagcgtcgagtacgcatcgggctctcgcgcgtgagcgaaggcagggtctgcgaggcgattcgagaggaaagcacaggaaggtcggtcagccaaggggcaccctattgatcgtgcactcgtctgtgacttaccatagacgaagggccgaccgaacctgatcgtgaggtacttgagctcgtcgtcctccgactctgtaccgtcctcgtcgtccgtgccgtcctcgtcaccctcctccgactgctcctgcacctcctgttcgtccgtctgagcctcctccgcctcctcttcctcctcctcctcatgacccccgtctgcctcgtcgtcaacgtcgtcatcggcctcctcggctccctcgtcctccaccggaagctgttcttcgacctcctcgagctccttatcctcagacgcgaagaccgtttcctcctcggcaaacgagacgcgcagatagatttgcggctcgtcaatcggtcgtcttctgggcggcgcttgacttcttcgagcatgagcgagtcaaacgtccggccgttgagcttcgcgtcggcgagcaagcagcctcctttacgaggttgcatgcagcctcgaggacgtcaacgaccgtcacgctgcgggatgctcgaccaaagagatgggcatgtcgtcggggtagaggactagagcggtcgtggtcgccactcccccgcagtgctcgaagctgaccgcgagctcgttgaccggcggcgacgtcgacttctcgtgccgagccacaagactgcggaaggggatcggccgctcgagccattctccgcgcgagttccagcgaaggacgagcgaatcgagcgtcgccgacggcgaccagtcgacgcaccggaagagcgggtgcgacagcggccagacatcatttaagtggctgaccttcgagtagcgctcgcgtcgcagcggcctcgggaggaggccctcgtgcgcgaacagcgccctacgccggtccggatcgggctcagtctcctgaaagcggatggcggcgagggccgggtcctcgacaagctcgcgataagagtggttgagccgctcggccttcttgcaaccctcgaagtcgagctcatgcgagatctggatccaaatctcgaccgggaggacgggcgacgacatcgtccggtcgtcgatcatgatcggaggcggggagggagcgggcgatgacagcgaggtgaggtcgtaagcgaacctcatggcggagggcaagagctgatggtcaagaggcaaaggtcgtccgcgagccaacacgagagacaaggtcgacgcgacgcgacgcgcctgctttccgtcgcgtccgactcgagcccgctgcctactctttcccttcgctcatcatgaacttgcacacggtacgacgtgctcgccaggcgcgactactcattgtcattgagctcgtcctcgacgtcgtcgcgcttgacaaagggcacgatccggccgacgcgatcggccccgcctccctctgcccgcgcagtgatggacgtctgcgagagctgggcccggacgccgtcgctgtcaagccagcggtcggcgtcggcccggatattggagcagagaacaatggccgaggtgccgcggaggagggcgtctgcccgcttcttcagcgccgcctcctgggcctcttcgcttaggccctcggtcttccacgaggcctcctccgccagccgccggtcggcctccgtctcccactgggtggggtcaatgtcggccaggaagggcgactgtcggcagaagggatggtcagcaaagcggcgtgtgggctcacgagtcgaactgcacgagacatacctgcgagacaacggcaaagtggctgcggctgggaaagagtgcgctgccgagcggcttgacaggccacttgatgctggagagagggcgaaagagtgtaacgactaggttagcctgcgctgacagaggctgcagcccagtttgcagggccacttacgggccgtccaccttgatcggcggcggaaagtgcatgtcgcagtggccgatctgaaaacgagagtgggacgacgacctcgtcagcctttcgaagccacttccgcagcagcagtctcgccaggacgtacgctctcgtccgttgcggccagcgctagcgtaaattcgcgctcttcgtgcttgaagttggcgatgtagaacggaaggtagatcggggtcgcctcgagcttctgccactcaaggctatcagtcgagaccgtgaaaggcagcgattggatcgacgactggcgccggaggacgtccggaatcgataggggcgacgtgtcaaacgggatggctgagatcgtctcggaccccatctcctcaaggtcggccgacgagaagacgttcgggacgtgcgacgggtcgtaacgccggacgggcgagtcgagcgtccgatcgatctggtcccgaatcgagacgctgatgtacgagagggggctgaccgaggtgcctgggagacgcaagacgggatcaggctgcgtacacacagcgaccaggtacgctaggctctcagggacgcacccgggaaaaagttgtcgttgagctcgatcgtgcccgtgacctccttgggcatgccctcgccggagaccgaggccgaggccgtcaggccctgccggctcaggagcgggcccgagccaaagttgatggtgatcatcgccccttccggagttccgtcgagtcgagcggcgtcgccgttgggcgaggcgtcacgcttggccgtccccttaacccgggcgtcccagatccaggccggaacatagattgccttccaccgagtcatctcgatcggattcgggacgatggcgaagcctgaggaaggcaggtcacttgggatcagtcatgacgaggtccggctccgagcatcagtcgcggagagaacggtcacggaccaaaggccgacttgctgagctgcgagaggatgccctggaaggaccgggcggtcgccgatgagaagatctccatccgccggagggcgagctcgggcttctgctggaacggcagcacccagatgtcggacggctgagggagcagcgggctctcgggcgcggccgacgtctggctcgcctgcgaggccgtcgaccggaccgagtgctggctttgcggcagcaacgatgcccgtaaaagacgcctgccggccggctgactcgagcgagcggcttgaagcatcgtctaggttgagacgaggccaggaccgcttgtcgcggagagaaaggggggcgaggtaccggcgatcgagctgagcgagggccttcggagtgacgaaacgagggaatgtcgctagaagaagctgttctggtgtgatagctcgaagcagacggcttcagaggacgttgcggatgggagcaaggaggcttgcgatagtgagagagaagggcgatggtggttcggaggggctgggcttggctgggcctgagcccggggacgacgccgcccgcccgcccgcgcagacatcatcggcggccgatccatcgccgtgcgtaagggatctggccagcgtcgatggggacgctgacagcaacagaggacggagacggactgatagggcaagtcatgatagttgtcgtgaagggggcgagacaagggtggcacaacatggtggtggagagagagtgggggcatgaggcggcgaggccgagcgcggcgtgaaatcacgattgctggcttctctggaaggaggggaactgcgagaaggtcattgggaacggcggcggtggacggacaggacctcggctggcgacccggggtaagcgcttgatcggcgagcgggaggtgacgatcgtctgctccggcgcaacgtcaaggtcagcggcagggcaagggcgggcggaggaaagtaagggtgacgcacctctccggtgacgacgatctcgtcatcgctgtcggacagctcgaggctctggaggttgagcgtgctcgggtgcgactgggccggcgaggtcttggcctcctgcaaggaggcaggccgacggccagccgtcggtcgggcaaccgggttcgatagccctggctcagcagagggcgtcgccgtacgcggacgcggcgtcgattctttgctagacgaaggcgacaggggtgagagcgagccattcatcgaggcgtcggccgtgctagtcatggtcgaggtgctcgctgcgctgtcggtgcttgcctttgaagagccagagacggtccgcttcgtccgcttgtaagtgctaccgaaggtatagggctcatcgtcgtcgtcgtcatcgtcgtcgtccgagtctgccggttgtttgcgggtcgccggctgtttgccgagagctggaagggatggctgcgttaggggtgactgcggtcgagtggattagagtcagctgctgcgtctccccgagcacatcagcaagcgggacgcactaggacggtgctgatacgagcgctgctgacgtcgatgacagactcggttcgggctcgtttcgactggccggttgttggcagggccgagagatctggctcgaccgcccggccagagagcgtggctatctgctcgcaaagccgggcgatgacagcctcttgcgaggcgaccgtcgtctgcagaggccatcgagcggcgatgtcagtgccgagacgaaaggtcggatctgctcgctcctggactgaccgcttggctcttgttggtacggccgtcctccttgcgcttctcgaccgtccgagccgccttggacttgacctcgccgagcgaccgttcgagcagctgcttctcgccccgcgcggccataagctcgctccggagctttgccgcggccttcctagtttgctcgaaatcctgctgctgggtgacccactcgacgtgcagcttgttgtgagccgcctcggcttcggccgtgcgccgctgcaggtcgtggtgcagcgcctcagcctggcggacgacggtcgtgaggcggtcgttctcggccttgtaggcatgcgtattcatctgccaggatgcaaggaggatgggagtcagcgtcagtgttcggccgaggcttccgagagtcggcgcgacgcacgtcggcgaccgacagccgctggcgcagctcctggttctgagccgccatcgcctgaagctctctgacgttgctcatccggccctggcggtcggccgccgtctgcaggatcccagcgcgtgttgtcagtattcatcagcttcgagcgactgaaggggagatcgcaccagaagcgtcttgttggccgcccggagcgaatgcacctcgtcttcgagcaggagttcccgctcgcgggccgtcttctccttctgagcggccatctctgccgggcgggagtttgcagggcagacaatcagcaccaccatctagctgcgatgggcgaccctgaacgcacttcgctggacctcggcgagagcaacgtcctggacatgccggctcgccaggaaggtcgccgtttcgtgtgcgagcagctctctgcgctcccagacagcctccttgagcttgatctacgacgcgggcgggcggtcacaagagcatctctcggtcagctctctgctggccctcagcagccagcgacaacatgaggaggacagacctcggctaaagtgtcccggactcggttccgcatgagctcaaactcccgctcgcggccgtctgccttctgggcctgctcgaaacgagccttccagtcgtcacgctccttgatggcctctgccttctgcttacggacgtcggccgcctcggcccgatgcttggcatcgagctcggctttgtcgtcgagcgtccgcttcagctgggtctcgagaaaggagcagcgctcctctttggcgcgcagggcatcctccatccctggcacgcccggggttcgggcagtaggggcagcaaggcaagaggacggttgctcaagctggagtggtagcgcgaggaaggaatcgcgctggagctgggctggatgggaagagggacagctgggacaggggcgagcgaagcgaagcggcaggtgttgatgatgatggtcggcggcgagagagggagagtgacggccgggaccatgacgacccgccctggtcgctctcgcttttaacaagatcgaacttccagcgaggacagagtacaggaaagcgtcgtcaaaggggtcgttcagatcgtcaacaaaatatgctagtggtagatggtagaataaggggtgggagggggcagcgtgtcccctccttggctcgcgctcgtcttgtgtcgtgcgtgttcggtttggtccgctggccgttgcggacgtggaagaggggtcaaagagctttgcgcctatgatcctaggatgcggcgacgttgacttctggcgggaaagcgaggttgttgccggcgctgacggcggcccatgcgcgtttcagacgcgtcaacacctcgtgtcgcgttgcgcccaaggccaaaagaggacgccgagctcgacgggacgagccggcgtgagtagaaagcgccgaacggcaaccagtccccggcgaccagatagtggccgggcgagagagggcttgagttaactgggttgcgtcggctgacgaccagcgcgtcttcacgcccaagcgaaggtgaatgtaggcttctcggcggccgcaggttttgtttttgactcctcggccggtttcgactcgtccgtcgacgtcgtagcttcagcggcggcggtggcggcgctcgtcttgcgctcgcgctcccagagctgctcggccggtgccggcttggggtccgcatcggcagcagcagcggcagcagccgacatacgctcggcagcctcggcggccgcgaacgaccgagcagagaacgtcgaccgcttcggcgcacgctggcgagggtcgtccgagggcggtcggggccgcttgccagcgacggtcggcccgccaaagtaggccgtccgagggggcgcgtccgacgcgaacgagaaggtcgacgacgacgaggcggccgaggagaagaagggcgagccaggacagtctggactgccggccgccgtcgggcggaacgagaagctgaagccggcttggagatcgtactcgcgccgtcgcttctcgcacgacaggacctcgtaggcctctttgacctgcagcacggagagaaggagggaggatcagcaggggagagtaagcgtcgcctcggcgcttgttgctcgaccgaacgcacctgcctgaactgctcctcgcagccgcccttgtctggatgcgtcgcgagcgaccggcgaaggtaggccgcgcggacgtcggccgacgaggcatcggccgtgagctgaaggagctcgtaatgaagcctgatcctggtcaacattcggggcggaagatggattggtgctactagtgctaatggtggaggtggactgctcgggccaggtcccttgaggagggcttgagacgggctggcgagcaggagcagatgcagatggggggagaaggagacggttggaggatgcgagcagcagcaggaggttcacctgcctgcctgccgcctgctacgcgccggccgctccctttccgcgtcgaggggccccgcaaagcccctttgccgacgacccccgacggaggccttgcctcgtcaacaacaggagcaagtgatgagaagtatgcatccaatcgatcacggcagcgaaccgacgctccctcagaggcaagcctgcctggtagccagcacgaagcggcggtcaagcctcggtcgtggcatccactgccgtcggatcggctagccagagcgcgggcagacgaggaggtcgcgcccgggcggcgcagaccgagcgagcggtgatagacctcctggtctgcgagctgtcgagcttgcagcctggcccgagggtagaggggccatcgaggcaagagacgggcctgattgtacattcctcctctggagaccatggccgccgtctaaaagagacctcgggacgagtagctcttcagacacagtctttcgtaggctgcatgacagggccagagggcagatgcgtcagcggcttccagcggaactctctcgcagcaagcaaggttgacggacctcatcggtggcgacggcaaattcgggaaactcctcggcaaacgccgctggtcgctcgtgctccgggatctcctggttgtctctggcccaggcggcgtagacctcggtacgttcgcgccgtagttgagcaggccgagaagctggagagaagccagccgcagcgcattgtcagcagagggaaggcaaagtcgacggctgttcctgcgacgaaccggcaatcttctcgcaggcctaggattgcaagagagattcaggcgtcaggttttagcgccgaacgtatcacgaccgccggactaacatacctggacttctgcagcggtcgccccggtgtaggcgacgtcgaaagccattttgcggccgacgatgcccgagccgcccgagccgacaaacatgtcgatctgattctcgggccgagcgtaccactgccggatgaagacgccacgcgcggcgggcgacatcttcgccgtctttgacggtccgccccagacgggcgcgtcgggcgggaggatctctgggtctgtggtcagggcggaagttgaggtgttaggcagcagcgcgggtcgatgcggatggccagcttgacgcacgagttgtgcggaagcgagcaatgatgcggtcgacgtctcctctcggagtacgttcccatgctcgcttgcacgccgccagctcgtccagctccatctcaaacggccggtcaggacaccagtcgatctggaagatctgccagtccgagatgggcagatgggtcggcgccagctcggccggatgaggcagtttgagatactcctgcgagtcgagtggcggtcagcggcgtcatcctggcatcggaggcgtggcgacccgacgcacctcgagctgggccggcctcatgccgcgcgtcgccgtgagctcgagcgacatgagctcatgtttccgctcaattggaagcggcactggaccgagcttgcgccagaagctgctctggatgagcgccacggtcgaagctgagcccgagccggccgtcatccgacgtgccggggcttccgtcggtcgactgtggcctcgagcaattcgggcaagagcggccgccttgaccaatccactcgtcggcgcttggctcgcactgcgagcccgcgctggctttgacgagctcttcttcggcgggagatcattccacgatgactggctgatgcggcgggcgatcgagtcctcgtagacgtcattctcgaattgatagacggcgggcgcaacccttgcggattgaccggttgcgctgtgtcgacttgacttgctcgtgatgctgccggaggctgaagaggatgagagagttgaggacgaggcgacgtcgctcgggctcgcctcgaccgcaagatgcgccagtggtgcgatgccgctctgatgacgcctctgcggcagacgaaacaggtgagaaggcttgctgagccccaagactggtgatggcgatcgagaagcataaaattagtcgcccgagagacaggagggttgtgcgaggcgcactcacgggtgggtgtagcgacgcctggtgcgacccgcgcccgagccagcgacacggcctgccgggcacctgtcaagcaatatcagtccacgatagtcagcagacagcactctgcgacgagaagaatcagggacgtactcgggcggctcgaagccgatcgagcgacctcaaccgcccgagggagggacacgcccgcagagcagctcatttaaggggctcgaccgggctcgcttgagcaggtgagagtccggccagcggtcgggcaacgctctgtgagcgtgaggaaagctcgagcgctgttcctgtgctggcttgcgccgtattatggaccagcagcagccgtgacggtcggatgacgagcgattgagcgaggcaggacgaccggcgcgtggatcgagtagcacctgggccgaagcggagagagagcacgcgtctggtgctgctgctctggagcaacgaagccaggcgagtcagtgtcagaaggcggccccagcagtcctccaggcagctgccagctgaccttgctcgacttcgcgtctgtttgagggctttgtggcgagggtcgacggtacgggcagaggagcgcgtcgagcttcgccggccgcccaagttcgaagctcgcacacctcgacctcgaccatctcgcctcgcagccccgcgccttcttcaactctgcttgtcgggaagcacagagccgctggcgatcatgtacgatcggcctgcttgcccaactactggcgatccgagagtcgtactgatggtcgccggctcctcttccctttcaggtcttcgctcgaccgcctcgtcattcgcggcatccggtcgttcgagtcggtacctccctttcgccaacggcagtctggggtcgtccgagtgactgatctgagcgcttgccctgctccagcaacaacgccgccgctgtcgtcgagttccagacgccggtcaccgtcatcgtcggctcgaacgggacgggcaagacggtgcgctcagaccctcgtcgccagcagcagcttgcgtacctccttgctgaccgccgtcttgtactcttgtcttaccagacgatcatcgagtgtctcaagtatgcgacgaccggcgagctgccgccgaacacgaagggcggcgccttcgttcacgaccccaaggtacgtcgatgcgcaggcgccccctcacgaaccccccccccctttgcattcgacgacgccacgccagtgtccaccctcctgccctgtcggacgctgatcgcatcatgatctgcatcatggcgacagatggccggagagaaggaggttcgggcccaggtcaagcttcgcttccacaacacgaaccgggcccggatggtcgtcacgcgcaacctgagcgtcagcgtcaagaagacaggcctcagcctgaaaacgcttgagggcgttctcgcgacggacgaggccggcgagtccaacgcaaaggtgcgggaggccgcctgtcttgccgtcgtcttccgctgccgccatctgactcgtccgactcttgactgccccctgtgttaccgtcggccccccttagcgcaacaccatctcctccaagtgctccgagattgacgcggagctgccgcgcctgctcggtgtcccgcacgcgatcctcgacaacgtcatcttctgccaccaggaggagtccaactggccgctgagcgagccggccaagctcaaggccaagtttgacgagatctttgaggcaaccaagtgcgtcgagccaagctctagtgtggtcttcggcagctgatcagctggtgagcgcccttctcagatacacggctgcactcgacgccatcaagaaggaccgaaaggaccgcgtcgccgacctcaaggccgagaaggcgcatctcgaccacctcaaggccgacaaagaccgggctgagacggtgcgctgccgtcgatcgtcagacatgccatcgctgagcttctagctgactcgcgttcctttctgcgcttgaccccctctctggccctcagatcaagaccaagatcgcccgcctgacgaccaagattacaagctcgcaggcgcgcgccgacgacctctcgtcgcaggcgtccgagctcgcgtccatcaaccttgaatggcgcgagaaggccgaggcgtttgtcgaagtgttccagaagcggcaggcgatcgagcagcgggtcgagacgtgggaggaggaggtacgcggaatggaggagagcctcgagctgctgcagggtgcgccccgaacgtctgcagaatcacgctgcgcgggcactgactcgtttttcttgccatttcgctctcgccctcagacaccgaggctgagctcgaggcacagaagaaggacttcgaccggacgctcgccgagaagcgccggacaaagatctcgaccaacaacaagcgggccgactgcgaggagcggctccggaaccgcgagaaggatctcgcgagctctgtccggcgcaagggccaggtggagggagagctgaaagtcagtgcattggccccgaccgggatgaggacgtgactgactgtcctgccgcgcatgccgccgcaggctcacgagcgcacgatcgccgaccgggtcgcggtcgtccagaccatctgcaccaagctcaagctgacgcagtacagctttgacaccctgacggccgagcacgtcgccgaggtgaccgagcacctgcgcacgcggcgcaaggaggccgacaccgagctacgcaagctcagggtgcgcgaaaccttcgcgtctcccggtgctggcaggatgtcgctgacgtcgcgtccttcctcccttgcagacgaccggcaaggaggaagagaaccggctgctcgttaagctgaccgatctcaactcgaccaaggcgagtgcggcggggtcgaaggccaatctcaagacgcagatcgtgagtcgtaagctcctcccgctgctagcgagcaggcgctgactcgatctaaccacatctctgcaggacgacctcgagcgtcagatccgcgccgacacgcaagattcgcagtcgctccagtcgattgcctcgcagttggacatcgacgcctgcgtggcccggatcgccgagcagaagggcctcatcagcaaggccgagaacgcgctagaaattggtcgcttcgagcaggccaagcgcgagcgacgggccgagattgcacggcttgaggccgagcgcgaggcccttgggcacgagcttaaggagatccaggccggcatggagcgccgggccaaggtcggcgtcatgcgcgccagctatgacgagaagcgcaagacgatcgacaacatgtgcgtggcgtctcgccgtcggtcgatgaaccctccgctgacctctcctgtcaacggcgccctccgcagcgtggcagccaatagcgatgcgtaccgctcgctgactggcaaggtgattgacgagcgcatgatggatcggttcgtctcggccaaggtccgcgagctcgaggacgaggtccgggccaagacggccgagcgggccgagattgaccgccgggttgcgacgcagaaggccaacctcaagactgagcgtgaccgtgtccaggacaaggcgcaggaggtcgcaggtgcggttcgcggcggtgtatgagtgttcgagcgcggaagctgacattcctcgccctgttggcatcggcagacttccgggagcagcgcaaggagctgctcgacacgcacggcgcggccaccctgcaggaggccgtcgaaacgatccagaccgagctcaccgagcggcgcgagtgtgttcctctgccggcttgctccatccatcctcccgtgcccgtgggttgacactttgcctccccgctcttcgtaggttcctcgcagctgccgaccacctgccgcagatgttcaagacaatccgcgacaacgcccagcgcaagaacctctgctttggctgcaaccggacgatcgaggacgacgagagcgacgccttcttcaaatacgtgggtcccggcctcccgcgctctgaccttcgttgcaggcctctgacacccctttttgggccgaccacagattgaacttatgctgtccgaccgccagcgggccgaggacgccgcccggtggaagctcgagattgccgggctcgaacggcagctcgtcgaggtccggacgatggccagccggcagccggcgttcgagaaggccaaggaggactcgacccggcaggccgaggagtggaagaagcgcaaggcggcagctgagacgatcgagaagcaggcggtcaaggtgcgtgttttcccgcgcccggcccaattggctcacaggtaatgctgacccacactgccgcgtccatctgcaggtcgcctcagagctcgaggcgcttcaggctgaccaggccaagcttgccgcgctcaagcaagaggcgaccgtgctcagccgggtgcatggcgaggccgaggtcctcaagcgcgacatcagcacgcttgatgatgcgaccggcggcgcaaagacaaagtcgccggaggatctcgggtctgagatcgccaagatcgagcgtgacctgtgggtgccctttgaacggctggcaaggcgcgagtgacgctgaccagcgcccgacgccctccaggaaggacgcccgtgccacgctcgccgcctccgccgaggagcaggagcggcttcaggccgacattttcaagcacaagtcgctgctctcgcggactgagaacgacctactccgggtcgagcagcagcttcaaagcctgcgcgaggtcaagcagcggctcgaggacgcgcagggcaagctcgacagccttcggcaggagctcaaggtgcgcgacggctgagaaaggcttggctgatgcccaatctgaccctgcgtgcgctcgtcgccagaacgtcgacgcccgtgtcgcagcggccgacgtcccgatccgagagctccaggcgaggatcgaacagtaccgccaggaccacggcgacgagatccagctcgccgaatcgcggctcggggcgctccagcagcaggctgcgaccctcagctcggccacccaggcggtcaaaaagtgcgtgtgccgtctttcgcctattgcgcagggatcggttgctgactcgtgttctgcgccgcttgcaggtgggatcaggacgagggcccgcgccggctgcgccaagtcgaggacgaagtcgaggaggaacagcagctgatcaactcaagccgatccgagctcgccgagcttgaaggccgcgtcaaggatctcgaagccgacttccaccaggccgacaagcggcgcaacacgctcgaggccaacctccggcaccggcagtacaaggcgcggattcgccaggccaaggaggagatcaaggcgctgccggttgaagagtcgagcgaggcgcgcgggaagtatgagcgcaactacggcaagtcgaagcagaaggagcaggagctcatcagtcaggtgcgcccgcttcgacgctgatcaggactttggaccgcgcgcgctgacggcccggacctactttgcagctgaatacgcttcagggcgaaatttcatcgtggcgagcgcagctgtcggaggaccaggcgacgctcgcgtccgagtacaaggacatcaagcacaagtacgaggtcaaactcatggacgtcaaggtcggtctgcaccggtgtagcgataggctcgtctctcgcgctgatgctgatctgccgtcgccactctaggccgccgagctcgccaacattgacctcgagcgctacgcaaaggcgatggacatgtgcgtcgacctcctcaatcctcccctgacgcttcctgactgacgcttcctgacgtccaacctccctctcccaggggcgtcatgagctaccacaaggtcaagatggacgagatcaacgacagcatcaagacgctctggaacacgacctatcagggcaccggtgcgtgtgtcgactttgatcaacaccttctccagcgcgctgaccttcaaacgctcgcgccccagacatcgacacgatcgcgatccggagcgacaccgaggagccaaagacgacgacggcgacgacccggcggagctacaactaccgcgtccgtccctcgtccgactgtttcgcaggggcccccggactaacaccaagcggtccgcctccccttcgcgcaggttgtcatggagaaggaccaggtcgagatggacatgcgcggccggtgcagcgccggccaaaaggtcctagcctcgatcatcatccggctcgccctctccgactcgtttggccacaactgcggcatcattgcgctcgacgagccgacgaccaatctcgacaaggaaaacatagcgtcgctcgcccagtcgctcgtcaccatcatcgacgagcgcaagcagagcggcaacttccagctcatcgtcatcacccacgacgagacgtttctccgcgagctcgcgtttgccggccagctcgacgtctatatgcgcgtctcgcgcgacaaccagcagaaggtgcgtccccttgatgattggtgataggccgatagggactgattttgactcctctgtcgcgacagtcggtcatcaaccggcacaagacggcgacgctcaaccactgaggagtgctgcactggccgcagagtacgctcccctcctgttcactttgacttgtttacgcaccgctccccgcttcacgacccactcccctcctcctctgatttacgaccctctgacgatctgtgatgaccgccctttgcacgacgctgttgcatgctcgcccgtctagcacgggcatctctgaggaggggagccccgcacgcgcggagggacgaagcggccgggcaaggcgagacggcagcatcttgccctcgcccaaccaccttcccctctcctctcgccctccctctcgcctgcatgtccgacgcgacgcacgaggcaaacgtccaggccctcgaggcgctcggcctcggccgcgagattgccgtcctctcgctcaaggtcggtcaagcgagcttccgtccgagaccccttccctgcccccctctccggcgtgctcacctcacctccccttgactgccggagcagaagagcaaaggcaacgtcagccgggcggccgatctcggtgcgtttcttggctctcgtcgtgcagggaagtggacgggctggaagaggggcaggatggatggcttcgagggcgacagacgcggggagctccctccgtctcgtgctgcggctcttggcacgccgaggagccctcccgtcgtcaccaaccttccgccggcggccttaccatgcgggccgctgctcgagcggcggcgttgcgggtccctctctggcgctcgcgatctccttccccgtctgctcaaggaggtctcgccactgacacccagcctcctcccactttccgatctcctccctcatcgatgccttccctcttccgccggacgtcgtctctccctgtcgaccgcgctttccaatcgcttgcagcgttcgagagcatccagcagtctgacaaggacgaggtgcgcacctctgcttctgtcgcccgcatgcggccagccagccgcctgcgatcttccgcagcgcacgcgtctgaccccccccccttacgccttcctgtcttgcaggtgagccccgccatcgccctcgctccttctctcccgacatccttcacagcgagcaaaggcacgtcgttgtcgtcgtcgtcggctccgacctcgcccccgaccggcgcccggccgcggcctgccaacgtccgctggccgtcaggcgagatcgtccgtaaagtgcggggcgacgaggccgactctggcgaggaggccgaggccgagggcggcgacagcggcaccgaaggcggtggcgcaggcggtgacgattgggtcgacgacgccaactcgccccagggcgggagcacgccgaccttctcggcgtcggcccatcggaggctgccgtctagcgcctcagctctctccgcctcgaccgccggctcgacgacgctcggtggcggcggcggctcgtcggcgtcctttgcgccttcgtcgtcccgcgcgagctcaatctactctacgacgtcgtcaaagagggccaagtcggcgcgctggctgacgtcgagctctggtggttcgaagcgctcgtcggtcaagctcggctcgagcccaccggcgtcgacgcccctcagccactctgtcctccgctcgttcccgctcggctcgatgggtgcgccttgtgtctcctcgtgagggcccatcgtcgtcgttctgctgaccgatcccgcttggccagtcccgctcggcgaccagaagaagatgtcgagcagcaaggcccgtaagcttgatgccgaggcggcaagtgcgtgctccttaccgtttccttcagcagacgggccaagcgctgacgaggccctccatctcacagagcacgacgagacggcgcagaacctcgtcgccaacctgtttgccaaggctgactcgtcgtcgacctcgctccctgcctcggtcggcggaaccgccaaggagaaggagaaggagaaggacgaccgcgactcgtcgtactatcggccacggctgagcctttttggccgccggtcgcataactcgtcgccgacggcctcgccccagccggcgcatgccgcgctcccgacttcgacgagcccgaacgccgtaccggcaaagtcatacatctcaactcagtctccggccgcaacactaacgtcgacgcagcagccgacgcagccaccgacgatgatcacgattccgccgacgccgattgtcgaccacccaccggcgtcggccgctcaaaacgtcagctttgacccggccgacgacgatgcgtcaagccggcgcggccgcgagcgcacctcgcgcctctctgcccggtccatgtcgcccttcttctcgcggagcggccgctcgcgctcgcgcgcccagtcgccgtcgtccgaggtcggcgcgctccgcggccggcagggcacgtccgaggcggccgactcggactcggacgacgacacgggcgcctacacgtcgggcgacgagccggtcggctacgacgacgacggctacgacgacagcgactatgaggagccggacgacctcggctttgacgaggtgaccgaccttaacacggacgcgaacgccgaggcgacgatggtccctgcgccctcgggcggggacggcgagatggtcccttggtctgacctctaccagacgcagccacaggacctcggcgagggccccaatgtcgtcgtcccacccgcgaatgagttcatgttccagcgctcggccgcgccctcggcgtccgggctggagttcctgaccggccggccagagttcggccgcgatcggtgtacggtcaagctgatccagggcgacccggacggctcgctcgaaagaagcggcaagcgccagcggcggtatgtcgtcgcgagtgacctgagcgaggagagcggctacgcggtcgagtgggcgatcggcaccgtcgctcgggatggcgacgagatttgggtcgtcaacgtccaggagaacgagagcaagggtaaatggctgccttaggcgagagccgcttccacgtccgccttcactgaccctctctctttccccctctcgcagtcgaccccaagaaccttggctcgcaggacaagcaggagaaaatcaagctccagcgcgagcggcagggtctcgcgcagagcctcgcccggcaggtcacggccgtcctccaggtgcgtgcggcttcgttgcctgcggtgaccgtcaacgcgacccgagactgacctcctttcctctggtcttgctggccgcagaggacgcacctgaacctgactatcatctgccaggcggtccattcgaagaactcgcggcacatgctgatcgacctgatcgacttcctcgagccgacactgatgatcgtcggcagccgcggtctcggcaagctcaaggggtgcgctaccgccgcccgccaacgcgactcttgtctgtacgcctgctgacccgtcgcctctcgctcgcagcacgatcctcggctccatgtcgcactacctcgtccaaaagtcgtcggtccccgtcatggtcgcccgccgtcggcttcgccggcacctcaagcggaccgacccgtcgcagctcaggcatgctgcgcgcgtctcgctcgccgaggccgggattgaaaagacggcgtcgggcaaggagaacgaggtgctcgacgcggctgacctcgaggacgacgacgaggtctccgtcaaagacgagcatcatcgcgaggaggtcgaggagatcacgggcggaccggtacactagattttcggaaccctgactcctcataaaccgccttcgcaccctctttcctttgtacgccctcgactcgctctcacctttccttcgcgttgtaaccctcccccctttcgcccggaccctgcctcccctttctgcatgcactgctcaacaaacttgcaggaagatcgtcaagcgaagcaggcgagccgcgagccgtaaacacgaccgcccttcatgacggcgagcaggttgtcctcgggccggtcgagcacgcagatgtcgtcctgccaagcgagcgggcgaggagatcagcgacgggagagcgaggtttagcgggggatgtcgggcgtacgagcgggttcttggcgaggacgatcatgtcggcaaaggcgcctggggcaatgacgccgagcttaccctccatccgaagcatccttgccgggttgacggtcgcctgccggaggatcgtctgagcaggcagcacggtcgagcggacgtaaaactcctcggtctggagggccgacatcgagctgaggaggtcggtcccgtagcagactgtgacgccgcacttctcggccaggacgagcgcctcgagacccttgcgcatcacctgagcattcttgaccttgccgtcgtcagagagaaagttctcaaacggcgcccgggtcatgatgccgtagcaactgagcgtcggcgtgaggaaggcacccttgtcggccatcagtcgggcggttggctcgtcgaggaggttgccgtgctcgatgccggtgacgccgttgtcgatcgcatgccgaatcccctcgaccgtgtaggcatgagccgtcaccatcttcttgctgcccgacatttgcttgacggtccgggtgatggcctggatctcttcggcgaggaactggacgctctcgatcgcgtccgtctcgctcgcaactcctccgcctgccatcaccttcaggaagtctgcgcctgccttcagctcctcacgtactgcgcgcaagacctggggtacagggcgggtctcagtggagggcgcgatagatgactgcctgcactcgacgtacttctgggacgccgtcggctgttcggccaagggactctgcgtgaccgccgcagcatgcaccgggagcaccgccactgacaccaggcgtaaagtcaccgtgcccaccagactgcgaaatcgctacgtaaaagaaggggggttggccggcgtcagcttcggagacgagagcgcacacaagaggagcgccagacgaacccttgccgcattggaagagccgcggaccgtcgatgagaccctcagcaatcgcatcggcgagggcttttgtggcgcctccctgaagagaacaaagcgggtgaaagtcagcttcagtaagtcaacgcaggtcggtgctcctggcgccagcgggccctgagggacgcccttccggtcaacagaatgggacgtacagtatcccggacggtggtgaagcctcgatgcagcgtctcccggaggacataggtggtccggaggtcgatgagctgctgcgacgtccggacgaggtcacccatcgtcggcgcgccagggacggctgggcacgtgtatcgaggagtcagcacagcacatggccaagcgccgtttgtctgaggtacgcacccgtgacgtgtacgtgagcatctatgaggcccggacagaggtacaggccgtcgaggtcggcgacgaggaggctctgccgggcagcgtcatgctcgagcgcctcgagctgcgcgggggagttggcaacgtcgatgcgctcgacgacaccatcgacgaccttgacgacccggccaggaagggttttgcccgaggctggatcgatgacggcggcattcgtcaagagatagccctttggagcagtctggatccagggcttcagcgcgagcttcggcaggctgagcagaaggcgagatcgcaacggcgcgtcggaggaggccgtcagcccaggttggaacgactcggcagggtcgacggcacgtagacgcacagcaatggtctcgtcttggctgggttcgggaagccgggcatgtgaggcgcagcggcgctctctggaatgtgcatagcgaggtcgagacaagggcggaagatggacgttgagggcgggtcgagcagggaggaagggagcagcggcgtggttcgccggctcgggccgagggcattgggggccccccgcgtgtctaacccaaggtagcgcctcctcgacgtcgagcaagagcaaggacctgcctggtggctctggcaggagatgttgtatcgagacttctgtcttgcaggtgcaagaacacaagcagggtcgtcgacgacgagctctggtctcgggctcggaccggcgcagcagcaacagcagccggccaccaaggtgcgacgacgaagccaggcgttccacgactgccagttctcaagcatccctctcgagcaaaggagagaccgactgacgtttgacaagcagctcgacgccagcatcgcatcatcgtctgacggcggtgcggccatgtctgtgccgtcgtcggctgaagccgtgggtaggttcggagggtcaccggtcggacgggaagctagcgacctcagccctcgaaccacatctcgcctaaccaaccgagtacatcaaacagcagacacacgagcacagtagcatcatacatacacctcgccgccatgtccgcctcggacaagctgctcgtcgccaaccgaggcgagattgcggtcaggatcatccgcgccgcccaacagctcggcctcccgaccgtcgcgctctacgtcgaggccgaccgcgatgcactgcacgtgcggctcgcagaagagaaggcgctcatcgagaactacctaaacaggttagtcggcctcctgcatgttattttattgcggagggcatgatgacgacgagctgaccgtttgccctcgactctgcgctccccgccgccccggcttcggcccgtcccccgtcgcgtctagcgatgagatcattgccatcggccggaagtttgcagtgacgctccttcatcctggctacggactcaagagcgaggatcacgtgcgtgcagcccggcccatcttcactgctcgctctccagtcgcttcccgtcgcctcgcgctgcgcagtccggcagccgacgaggtttccgagggtgaggctgacctcatcctcctcccgtacgatcaggactttgcgaccctcgttgaaaaggccggcatcatctggctcggtccacgaccagaccaaatcctcagcatgggcctcaagcacgaggcccggaaggcggccatcgcggccggcgtcccggtcttggcgggcaccggcctgttgacgacggtcgaggacgcggttgagcaggcagatcgcatcggatatccactcatgctcaaggcgagcgccggaggaggtgggatgggaatggagctctgcgaggacgcagaggcgctccggctcaactttgagaagacggtcggcaaggcgctcgtgagtgctctcgctctcttgcgcgcatgccgcgctctgaaacaggctggctgattgaagccctgctctggcatagacgctcttctccaacgccggcgtcttccttgagaagtacatccggcgggcgcgacacgtcgaggtccaggtctttggcgacggcgccggccgtgtcatcgagtttggcgagcgcgagtgctcggtccagcgccggcaccagaaggtgctcgaggaggctggcagcccctttatcgcccgccacccggcgcttgggcgcgatatgcgcgaggcggccgtcaggctctgcgagctgatcgagtaccgttcggccgggacagtcgaatttatcgtcgacgacgattcggctagcttttgcttcctcgagctcaactcgcggattcaagtcgagcatgcagtcacgttggtgtcgcttcccacgacgatgactcacaacatctgctgacccgcctttcgccgtctctgctccagcgaaatcatccggcctgggctcgaccttgtcgccctcatgatcaagctcggtctcgcggcccgacacgggacgactttcgaccttgccgaccaggagcagtaccgcacagcctcagctggctttggcatcgaagcccgcctttacagcgagatgccgcaactcgacttcaagccggcaccgggcctcttgaccgaggtcagcttcccgagttatgactggctccgggtcgacacctgggtccagacgggcacgaccgtctcgccctttttcgacccgatggtcgccaaggtcatcgctcggggcgacacccgcgaggaggcccgctcgaggctctaccaagcactctgcgagacctcgattaaaggcccgatgaacaacctggactacctctgcagggtcatcgactgcgcgggtgcggactctcgtctccccgttgaccggcgagcgtagagacagctgacaaattgcgcatgttctcgcagaattccgtgcgggcaatgtgacgacggcctttctcgactcgttcgagtacgtgtgtccttgtatcgaggtcatcgagtcgggcctcgccacctcggtccaggacggaacgcctcgtgtcaagggcgacggtattccttatggcgggccgtttgacacgctcgccgcccgggccgccaatgtcctcgcagggaacgacgagaaggccgaggtgctcgagtgcacgatgatgtcagtcattcatggcccgccaacggcccgctgtaactgtcgctgacgtcttattcaccatataggggaccggcattgctcttcagcgaggagacggtcatcggtgcgtgcggttcgtttgacttgcctcgacctagacccgccctgactgccctttccgatcgtccaggcatcgccggcgccgggtttgacatcagcatcgacggcgagccgcagccaaactggtcgcggctggtcgtgccggcaggaggcctgctagagatcgggacgattcagggcggtggctcgcgactctacctcgcgatccgaggcggtttccctggtgtgccgcgctacatgaactcgaagtcgacctatctcggcggcgcgcttggtggctatcaggtcagctgccgagcgacagcctaccgcaaggcttcatcgctcacccccactctctcctttcaacagggccgcgacctcgtcgcaggcgacgtcctcgagctctcagcagaggcaaagccagccgaagagctgtcgacggtcactatgcccgaggttgcgatcccgacgtacgccaactcgtggcaactcgcagctctgcccggcccgcaagccgacgccgactatctcacgccagacgacctcgcttcgctgttcagcacgacctacaccgccagcctccagtcggaccggaccggcatcaggctcgacggcctcaagccgctcaagttttcacgcgagaacggcggcgacggcggcggccacccatcaaactcgtgcgaccacggttacagcgttggcgcgctcaatctcaacggcgacacgcccggtgcgtcgcgactgcggctgaaagaagctgaggctgagaagttcgctgacgctcaagccgcctcgctcgcagtcctttgccccgtcgatgggcccgacctgggcggcttcgtctgctgcctggccgtcgtcacgaccgatcactggaagctcggccagattcagccgggcgacacgctccgcttcgtcgaagtagaccctgcgagcatcagcggtagccgcaccgcccaggacgcatggctcggccgcatcgcccatctcgtcggcggtcctggcgcagctcagtcggcggcggacccattcagcgcacctgttgcgacccatgcgagctcggacggcatcctggcccggatcccggccgacgtcgagcagggtcagccagaaatttcgttccgcctttcgagcgacgccggcatcctcgccgaggtcggcgagcaggcgctctcgttcaagacgcgcgcctttacgcagctctgggagaaccgtctgcgcgagaggaagatcgccggtcttcagtcgtttggcccgggaacggccagtctgctcctccgctttgacccgaccgtgatcgacgcgcaggcggtcgtccaggagatgctcgcgacgtcggccggcctcgctcaggcctgcctcgactcgaaggtgccctcgcgccggatccaccttccggtcgtctttgacgacgccggcagcaaggagtgcatcgagcgctacatgcgtctgagcggccgcgacgaggccgtttacctgccgagcaacgtcgattacctcagcaagatcaactcgttcgactcaaggcaggccctctacgacagctttctcgcgaccgactggtttgtctcggcccgagccttcttctgcggtttgccgttcctgtgtcctgtgagtgcctgtcgatcgagcagttgtcacatgcgcgctctcctgctgaatctcgtcgtcacttctcgcctcagatcgatcaaagatcgctgctcgtgtcgcaaaagtgagcagacggccggccggaccgcttgactcctacgattgacaaaggtccccccctcgacaggtacaacccaagccggacgttcactccagccggcacgcttggctacgctggctgctcagccgccatctgtacgtcgctttggccagagcctgctttcttattagtgcgggccgctgacctaccacctccacatgccgtaaccagaccccatcgacagccccggcggctaccagatcctcggcaagacgctgtcgcccttccggcgctggacagagacgtacgaggaccactttctcctccggagcttcgacacggtccgctgggtggccgtcgacgaggcggccttcaagcagctcgagtccgacttcctccagggagaatacgcgcccaaggtcgagcacatcgagatttcgttccgcgagatccaagcgctggaagactcgcaggcggttgaggtcgccgagctccgtcgcaagggccgcgcaaagctgaacgagtacggagccatgtgcgtccgagctcttggccctccattgccgaaggcgaccccttgactaacccttgcggctcccacagcgagtcgcgcttggtggccgccttccaggaggaacaggcggcagcagcaaaaactgagcgcttcagcacggcgtctggcagtagttagtctgagcctttgccttctttccgcgaggcaggcgggcgctgacgcttcagccttcgactttcgaccataggctcgggcacacctctgaaggctccactatctgccacggtccgcgccttcaagatcgaggtcggcgacgcgctcgacacggtcaaggtcgccgtcgtcctcgaggccatgaagaccgaggtggcggtcgccgtgccgcgggcgctcaagggcaagaaggtagcgtcgtttgcggtcgcgccgggcgacatcgtcaaggccggccaggcccttttgtactgtgaatgacgagtatcgacgcgcgttccgagtctctgtgatgatcatgacaatgcctcattgcagcgcgtcaatggccttccggacgctcgctgcgaggccggtcgcgcccggcaggtcgccatggacgcaaatgctaacggtcggcgccggccagttgagcgtcttgcccgagagcgtcgcgtactcgcgcgtcgtcaggagccgggtgacacgagcaatgacgtcctgttcgctcgccggctgataagtcttgcggtcgggcggcgcgagcgagccggcgtcgtcgtactggagatcgatgtaccactcggggatgaatttcacgccggcctcgctcgcagcctgctcgtgcgctgagccagggaggccgaccatcgggacgtcaaagagcttggcgcacgctgcgctcgccctcgcaagctcgatgtcgtcggccgacatcaggtatgcctggccgtgcggcttcctgcggcgcgagaatggcaatggccgccgggttagcgcccaacgtggcgagtagccttatacaggtcgctaggcagcgcacgtaccagtggctgaaggcctcgaggccattgaaccggcagatggcgagcagcgcaccaccctgggcggccaagcagttgcggaatgacgccggcggcatcactatcttgcgccggccgaagccctggcggtctggcggacgaaggccgcaacaaatgagctaggtcagcttcttcgtcgagggcgaacgaaagcacctggagagcgagcgacgcaccagggaatgacgcatgtgcgccgacctgaacgcccttggcgagagcgagcttgacagtcgcatccatcacgtcccagtcaccggcctgcatggtgccgagcgacgaggcgtcagcgcttgccttttgctggtcgtcgaaatcggagctggcgacagacatgctcgccggcggcacagttgatgcggtcgacgtagctcatcatcgcctcgtcatcgcctgccggcgcggcggcgggtacgtcagctgctctgtcggtcgagtcgacctggatgaccgaggagggacggaccgaggacccaattgccgaaggactcgccgcagtcgcaatttatctcggccttgacgttctctggcatagtctgagggggaaggatgggagggagaggagatggaaaacggagggcaggtcgtggtcggaggggctgaccgtcggcggaggagagtcgcctgaccttcccagaccgaccatgcttccatctgtctctgcaacctgtcccgactgctctccaacggggacaagatgcaagcccgtgcaggcttctcgtgctacacgtctgagcgcttcgaggcggtggcggggagcatcgtcgacgacgcacctctccccagccgtcggaggaggccggagtcgcgcgcagcgacgattgacacgcccctcccttcccctcctgaccgaccgcaggtctttcggccctaggaaagcgggggtccggttgctcaagcccaacaagagcgagacgccagcccgtccgaggtcgtaaagtcatcatcgtcaagatcaagggaagggagggtcgtagaaggggagggagcactgcggttcgctcgaaggaacactcagtagcggtcgagtccggcgagcttacgaccgacggccgtcagcttgggcggcgccggcaaattgtccttgatcttagcccaagcagcgtcgtcctcggcgtcgggcttcattggccggacgcggaagctgattgggtcgtgcgacgtgcccgagagcttaacgaacgcctcctgcttgctcgcatagacggcgtccgaggccatgctggcgggcttgtagcagacgtaggcagcgacgcgggccgttttggagagcggcacggcgccgtagtggacggcgcgctgcaagggagcgagtggaagcgaggtcagccttcgatgcgggtgcaggggcaaggagaagagcgagagaccgaccgagtcccagaggatgagcgagccgggcggagcgcagatcttctcccagtagcagcccttgctcttaagccagtcgagcatgaccgggtcatgctggtaccagtcgtcgccagaccagcctccgtccggcatccggtcagcgaacgttgcgaagagctcctcaaagtgctccttgcttccgcggaagacagtcaggccgccgtcgagcgggccattctctgcgaggttgacaatcccttggatagcgtgaagccaaggccgggtcgggctttggtcgacgtgcggccaaggcttgtccaggcccttgttggcctcgtccgtcaagtcgagcgggacgccgatattgataccgtcataagaggctaggagctcgtccgtgttccagatcctggagaaggcctcgacgaccttcctgcgagggcgaggcgagaggtggggcgggaggcaaaggggtcaaccaactcggtcgccgaccgctactcacacaaggaacccgataactcactcctcctggcggatgtcccaggcgagctgcgagtgacagataccattggtgaagtagaggccacctttgacagaagacggcaggttggccgccttccaggtcgaagggtcgtcacgacggtagccgagctcgaaggactcgagccaggcgtgcgcgcgcgagacatactccttcgcttgggcctgcgagacgacgtctggaacgacgacgacaccttcagggaaggaaggagaagatcggggtcagcgaaaggttcaggcggggtcggtgttcaggtggaatgcagctgcgcgcagccgcggcagccgcggccaagaacagctggccgagctcgacgcctctccgaccaatccgagaaaaggatgaggacggaccgtcgcggaagagagcgtccctccagtcgccgtgcttgatgtccgaggcaatgagcgaggccgaagtcggcttggccgtgctctgcgaggccgtcaagcgggcggtagcctcgtagggctggtcgagggccgacgaggcctgctgccgatggagggcggcgaccgacatggctagtgctgcttggcgggaagtgaagcgggatgaagtaagaagaggcaagaggttcgcaggccgaagttggagttgggaagaagagaagacgacgggggtcagggcgaaggcgaaggcgaaaggcggagggtttaaggccgtcggttcggcggagttgggcggaagccaggagccgacgtagtcacgtaggtcggcgaatagcgtcttttctcgcgcgcgagcctccgaggtgccagcagagaaaggccgaggattttgaacggacgaagcgtgcaagtcgtgatgaacgtcatggcagagcagagctagataggcagcctgcgaacctcctcgagcgtccactgtgagagagagggagagaccaaaagcaggagtcagtcttgagcaaccggctgtgaggcgcaggcgaccggccgacggacgtagcggagcatattctcctggccgaggtcggccacttcttgatcgagatgcgcgaagagcaccgtgcggaaggaatccatgacggcttggagcttgaccgggtcgtaagccgtcggctcggcgcgaaacgccgtcagcagccggccatagcggtcgaggccggcgtgaatcaggcgatgcgattccgggtctaccggggcgggcgaggcagacggagggctcaggacatgggcgcggcgagaagtacatgcgccgcagacgtacgcgtgtcgccgaactcgagtggcatacgcttcgccaggatcgggaactggaagagaaggcagagtaagcgttgagcctgagttagcgttgagccttgggtcaggaggctgggccgactggcggggcgtaccatctgcagacggcacgggagtgaggggagtcagcgcgcgccaacaaagctgcagcgaggcagtcgcaaaagacgtaccatgcgctcctcgatactgtccaatcacagaggaggcgtctcgatcagccgagtgagcgacgtgcaagagtcgagcaggaagtcacgcggcaggcagacgcacgaatgatggaattcgagctggcgctcgaacgcctcgcacatggcgagaaagtcgccgaggcccatcccatgccgctcaaacgaaccgtctgcgagccggtagatcgcatcgaacctacgagcgagtgcgagggcggtcgtgtcagcaccaacaggagcgacctgctgctgcgcgctccctcatcagccatcagggggtcggacggactcgtgccggaagtgcgagtggaagccgtccatgcgtgcgcccagtcggccgaactctttaagctctctttggaggtagcgtgccgcgatcagaagttagctcgtatcggccggaaggcgacagcgtcgagaggggtcgcgacgcgggggtcgacgccaccctcccgagcgagcggggacgcactttggcgagagctttctgccctcgttcggcatcggcggtggcgggatgaccttttccttccgaggcattgtgggtgagagcacgggtggctcggagtgggcgttcgggaggctcggcggcgagaggggcgagctcgagctgcggggcgctgctgaagaggcggcagcggaagagggggaagcgagccggcgctgaaaaggttgccgggcgagctggacggtacggacgaggacgcttatggtggcagaaagagggagcactgggtgaagctggtcgaggagtgtggtggtcaaggtcaggtcgaagcgactcgatagaaggggacggagtaggccggcctgggaacgactacccgcaggcggctgtcagcatcggtcgaccctcctctctcgatttccgactgccggaggtcggtaatcaagggcgctcgcagcttcttgtccagagatcaggtaggctgactcctcctctgctctctgggcaggtagagggaaacgagtctggcgtgttggcagctgctgcgccccgccaacttccgacgccagacgctcgcacgtgaaattcgctctcgctgtctgccgacgtccactatcgcgccaggtcgcaggagcgacgcttcgaacctcttatccctcgcctgactgacctcgcgaacagactgacctgaacgttgtctcgctgtcggcgggtgcgtcggccgttgttgacttgggccgcctcctcctgaccgtctgctcgcgacggtcgacgctcgcccgcccctttgatccccaacggtcctctccagctgtgcggagcgacgtatcgcttgcgacgggacgggtttgcagccgaggcccgaacacgtccagcgctccgatcgaggaggagggcttgggcggacatgtgcgtcgaagctgatgcctgcgcgcgcctttgccagatttgtcgatgacgctgaccatcaatagctctcatctacaggctcgcggcgaatggtcgtcggtcgagagcgtggacgtcagggcgcggctagcgtcgaggccggcgaccggtccgcagtggtgcctgcgagcgcgcttgacacccttgacccctccgttgagctgactctcgcgcggacgcacgctttacggccggcctctggcggggccgacgaacgcgtgcgtccgagtgcgcatgtcttgcatgtcggagaaggcaggatggacggtcagagctccggaggctcaccgtgccgatgactctacgtcggaatccacggtcgactgttcgctttgcaccggcagatgctacccctcaagttcttcacagccagcgctagcgctccagatgagcgacgagacagtccgtgcgactaggcgctcgtgctggcctgcgaagagcaaagcctcgtcatcgcagcacggccgcaatcgtctcgtcacgctcgactgagggacttgctgcttcacactcgcgcaagtcgcctggcctgtcacttcgttttgcgatttcgatacatgatgtaggcactgctgctgcgaagtcgaccaagacttcaggcaggcgttccaagtagactcttggacgaggctgcaggccgcactgaggcttacggctctgtcgcgacggcagccggccaatctgaaagcctgggcaacaccaccatccgaccagactgaggcgctggcataaggacgttgctcgtgctgccacgcacagccatcagggacgctgaacagttgcttaggtactgcacgagttttaactgaagggccggtttctgctaaacattttatttgacccttttctctggcaatctgaaacccctcaatatgggaagttccccgacgatgctggccgcgcggagcgaagcacagtcgcagctccggcttcctgtccgcgctttgagtcctacaccagcccatccctcaagtccatcaaggtacggccctcgtacggcagcacgacacggacgagcagcagcagatccagcagcagcatcgactgcagcagcagcagcgcactttccgaaggaaggggaagacggccggtcggggcagggcggctggcagtagcaggggacaatgaccagctcgggctcggcgggctctcgtcaggggctgtcggtctagagcagacgtcttgctgctcgtcctgccgggagctggtcggagtcgcagcggagtgctctgccaggatggggagactatattcgaacgagctgggggagccgctgctccgcctgctgctcgaccggtcgtcgccgctgctgctgtcgctgctgctgctcgctgctgcctcaagctgcttgtcgtgctgcctgggcctttgcgcgggcttagccttgtgctctccttcgagcgcgtgctgaccatctcgctcgtccgtcctcccctgtccgtgcttgctcgcttgcgtatgccgccgctccttgctgcacgtcgcttgctgcgtcctactcgccctcgacctcacccgttgccgtccctcgctcgtcctcgcccaccctcgtggctcgcccctcgcagatgaaggttgagatctgctcgttctccggctacaagatctacccctcgcggggaaagctctacgttcggggtgactcgaaggtgcgtcctccgcagctggtgtcggctcgggactggtgggcctgcttcggctcacaggagttttgaaggagggaccatcagcctgcctgagcagcctctccggcacttgtctttgggagctcgttgctgaccgccttccccctcttgtcgcgctgccaggtcttccggttcctcaaccacaagtccgagtcgctcttcctccagcgcaagaacccgcgcaagatcgcatggacgcaggtctaccggcggatgcacaagaagggtgtgaccgaagaggttgccaagaagcgcagccgcaagacggtcaaggctcagcgcggcattgttggcgccgacctcgcgtcgatcctcgccaagcggacccagaagcccgaggtccgcaatgctgcccgccaggcggccatcaccaaggctaagggcgacaagaaggctgccaaggccgctcgcccgaagacgactggcggtgcccccaaggtgtcgaaggctcagatgaaggcgcccaagccggcccgcgtttagagaaaccccttccctttgacgatggagaggatggagagggggcgctggattcaaatgcattcatgcgcctcttgtgacaactcggccgtgcatgggcgagtggggctgtgtcgagcgtgcgtgtgtgggcgagcggggccgctttgagcgagcgggatggtcataggtcgagcggtcgccaggcggcccgaggaggttggctgcgcagggaggaggggagagggagggagcgaagaagatgggtcgtgcaggccaaaagatgagggtgcgcggcgttggtcgtccctcgtctgagcagaggcgtgtcggtccggacaaacgcagctagaggagcaccttagtggccatgcgttcctctctgctggccttgcagaaaacgagcgcgagacaagaggcgtacaaaaaaatagctacggctacatccatcagggcaaaccccccgcgcgcctagtcgtccttctccgccccggtcgagacgtacatgtgcttcgtaaacgtcttccagagcggcttgtcggcggcgagttggcggccgagccggaggtacgacgggatcgtgaggtccttcaggcggtagggcgtgtactttttgagggcggcggtggtggccttggccgggggcgggtcggcggagtctgaggaagaggaggggaggagggctgcgaggagcggctccgggaggaggtgcagcgggatcggcgggggggcgtcggcgccctgctgcgtccttgggcccgggatgaggaccgagggctcgtacgtcgcgtactcaagcttgtctgcaagccgggcgattgggaggtcatcagtcagctgcttctttgcaagaagagggaggagagagagagagaggggtgacgaacactgtggtgcctccttgcgctcgctattgacctctggcataaaccactgcgaccagcccaaaggcgtcccaaacccattcgtccggctcggcgaccgctcatcactgtacctcggcttgcgggcctggcagaccggctcaaattggtgcttgcgccgccggcaccaggccgagccgggccgatgcgcaggcggcttcttgtggcggtgccggccgccgtgcttcttctttttgcgcttgcgccggagctcggcgtcggtcgagtcgacgtcgtcctcggcctcatccttgtcctcctcgtcatcctcgtcctcctcgtcctcgagatcagcctcgaagagctcatcctctgccgacgcgccgagcgactcgagctcgaggcccatcgtctggttctgccggaagggctcgcccgtcgtgttgtacctttcgagcgggcgtcggaggtcctcagacagcaggggtcagcccacgcgcgcaagcaagcaagcaagcaagcaagcaagcaagcaacaaccgagcccgagaagagagagctaggaggaagcgcgagagagtaaacgcacgtaaacaccctgacgctcggaaaatacgtcgggatcacgctcggcccgacattcacgaccgcatagccgcccaggtccgtcttcctcttcgactttggcaggcgccggcaggcgccgagcaggtcgcccgcgagcgtgccggatttcgtgcgcgatttgaggatcgacaggttggggtcggacgcggcgcaggtgtcgtcgtcatcgtcgttgaagaaggatgcggagccggggagacgagcggccgaggagagagcgacgaacgacccgagcaggtcatccgcccgcctcgcgcgttcgaccgcctgctctgcatccgcgctgctaagggtgctgttcaacgtgccggcagcggcagcgagggcagcacgcgactgggcggagaggccggcgtcaacaaaggcgtccgggtgctggcgccattgttcgagggcgtcggactctgtgggacgcgcggaaaagggggggggaggtggagagaatgggagcttgcgtcagcctcaaagggcaggtaggcagagcccggcccgaccttccagcgggaagcgagcgagcgagacgacgcacccatcaagaaccagtggtcgacattcatgtgcccaaacagcgagccgacgatcgtgtcctggaagcgaagcgcgagctcgccgaagcggaaccagcagtctgggaagtaatttccggccgaggggggcacatggcctgagagccagacctgccaagaggggggcctcacgcctcccacgacgctgcccacctctcccacctgtctctctcaccaccatcgcctcgcagcccgcttgctttggcatccacggcaagccgcttaacccctctcgtccggctcgcaaaaacggcgcggatccactctcttcttcgaccgcgctggccgatctccatcagccggcgggctcacctccagctcacctccctcgccgacccctccaccggccgctgacggttgaccactcactctgctcacctcgactgacctcgcatcctatccgggcgctcgtgctgtcccgctgacgtttgtttctggtgcgagaggcctcttcccgactccgaggcgactggcgagctgatggctccgtggaccacctctcataacattgagatagtcaacctgcttccagacctcacctctcagccagccttgtagtcgaattgtctccctctctctcctccccgtctggcaacgtatatgaacattcgcttgcgcatcacaagaccggttccgaagcgagcccagcgcagcctgcagcgaatgccgggcccgcgccgagcaccggccgagcgaccggctccgaaaaagttcagggggatggattgtgaatttcatcttgctccccctcgatcataacagttcattgtcgggcacgcaatgattttcatcgtcattagagggacacgacgactgtgaacgatgaaaatcacagtgcgaacttcatgggctttattgatgaaattgatgaggggactctgattgtcaggcgcggcagctgtgaaaatcaccgcggccgatcatgaatcgcgccataaaattcatgtctaactactctcttagtgcctgcaacgtcgacggacgaacgcaagacccgagtgtgcccaagtcgacgcccagatgcagcccagagccacgcgaggcggccccgtgtaggccgcctccacctgcgccggacaatcttcagctcttggtcgcagcagctactacttttttttgcccagaagaggcaagcatgaggcgcgatcttcaagaggccggcctcagcctgtcggtctgcctgcctgcggagactcaccggcctgatcagcttggggcggcccttctggcgtgtggcgaaagcgcgaagcattgcgccgtcgcgccgggccgtcgactcgtcggccccgcttcgaccggttctccgtcgaaggtcgccggccgccccctcctgctcatctccaacttttttgagccgtctcgcaccacctctccgtcgacacccacccctgaagctcattcccttcccctacgtctccattccgccatgttcgctcgctccatcgcccgctcggcgaccgcctcgaccagccgagctgcgtcggcctcctccgccgcctctcttcctgcgtccgcacggcggtcgttcgccacgagctcgctcctccgcaaccccgacggcaagtctgaggccgaccgcaaggccgagtacgatgcgcaccgggtctacgtccgtcctcccgatgtggtcacgcctgaatgccaacactcgtgtccgggctgaccgccagctcatgcctcttgcccggctcgcgcctgtcgcttcttgcttccggccgtcgcactcgcaacaacagaacgcaaagacacaggacggcaaggacgtcattatccggtacgactcaattgcgaaggagattggcgacgacctcggtcaccggacgagtcagtccagggagccttctcagccgctgcgcggatttcggcactcacaatgatccgcccctgtgcagtcaacgtaaacgagcgccggcacaacaagcggacgctccagacgctctcgtttgacggcaaggtctgcgtcgtcactggcgccgcccgcggcctcggcaacatgtttgcacggacgtttgtcgagagcggctgctcaaaggtcgtcatcatggacctcaaccaggccgacgccgagcgggcagcaacggagctcgaggaatggttcgagcagcacggcgacgtcaagaagggcgacgtgacggcgctcgggctcggcgtcaacgtcgccgacgaggccgccgtccaggccggctttgccgaaatcaagcgccagtttggccgggtcgacgtcctcgtcaccgccgccggtatcgtcgagaactacccggccgaggactacccgagcgaccggatcaagctcctttacgacatcaacgtccatggcacctactactgcgcccgcgaggccgccaaaatcatgtttgacaacaagaccaagggctcgatcgtcatggtcggctcaatgtcgtcctcggtccgtcctgtggccctttgcctttttctcgtgtcgttcgatactgacctttgcaatcgctccctccaggtcgtcaacatcccccagcgccaggcgccctataatgcctcgaaggcggccgtccggcacctcgcggcctcgatggcggtcgagtgggcagagcggggcatccgagtcaactgcctcagccctggctacatgctgacggccctgaccaagacgattctcgaccgcgagaccgagctccgcgacaagtgggtcggcggcacgccgatgggccgtatgggcgagcccgaggacctcaagggcgccatcgtctacctcgcctcggatgcggccatgttcactactggaatcgacctgcgggtcgacggcggctacactgtagtctgagaggactcagctttccgatcctgtcggctctaaaataggctcagacggccgaaaactgcgccagtacaacctgtttcctttgccacttctcttcacaaacactttctttgcgatgcccgatgttctgccctcttgctcgcactctcggcttgtcgacttctgcgtctgagatctcgtcagccagcagaagccgtctagccattgcggtcgcgttagtcatcttttttgcaatccgccatctttgtacgcccgatgccggccgaagaaggctggcggcgtctctgggtgccgtctgttgtacagcctgggggcgcagattgtgctcgctgcttcggagggaggtcgaaacgtgcgtgcgtcaagcgtctgctgcgcgccgccgggccgccgagaggacgaacggcgggaccgggcgagggcagcagagggagctcagacgaccgccccttcctccgactttcaacgacgccatcgccttcgcttccgcttgcccgtctctcgtgctgccctcagctctcctccaacgccgaccgcaagaccagaaggacagacccttctcgtcgctcgactcgcgcgcgcgcgccgtccccgcttccggatcaggcccccccgacctggcatcaaccagccctcgacgccttccctctctgtctagcgatcagcaccccttgcttgctttaccttcgctcttcatccagctcgcgcttcggtcaaggccgctaccggagcaccatctcgcccagccctttggcttcgcgaccgactcacacccggcagccgagaccgagccggctagtgcctcgagccggcaagcacgacacccgtcgcaggcgaccagcgtttgagccaaccggattccttcacctacacctcaacatctcgctaggatgaaggtgcgcctcaagaacggtgccgtacgcaggaggtgtaggctgacgccagcacgtccccccgctcgctcgtctgcacgcgaaacagttcggcaagcagatccagagccagcagatccccgggtggaccgagtactacctcgactacaagtttctgaagaaggtgagctcagagatcggctgctctagaggacgtctgacctgacccgcatcgtctccgtcagatcatcaactcgctcgccgccaaccggcccgcgtccgaggtggcggctctggctgccggcatccgaccgcctcctccgccctcactcctcaacggcacctctgcggccaaccgatcagattcatacttcaacggccggggtagccatccgtcctccgcagcggtcgcttccgatggggccacccacggcagcccagagccgatggacgacgagccactcccgccgagcgcgcagccgccgactcccggctttggcagcagaggtggctcgacgggcaaggtccaaagcttcatgagcgccggcgttgcgctcgcggactatggtggaggtggtccaccttcgctcgagctgaacgggaccgctggcgtcaaggagaacgagacgctcatcgctcatcggaccgtctttttcttcaagctcgagcgcgaaatggagaaggtgcgcggcgtcgctcatcgcaagcagcagctcaggtcgctgacatgcttcggctcccctcatagatcaacgtcttctacctgcaaaaggagcgggacctccggctgcggctcctcacgctgctgtccaaccggaagcggatccttgcctcgctccggccaggaaacggtgcctcagctgacctcaagctgaacaatggtccgacatcgtccgtccttcgggtcgagtggaaagcgctcgaggagggctggaaggtgctcgaacgcgatcttggcaagctgcaggtgcgtctcggagcctggcgatcgaccgaagcaagctgctcgctgacccgaccgatggtctctccgacagcaattcatcgagatcaacgccgtcggtttccgcaaaattctcaaaaagtgggacaagcgcagcaaatccaacaccaaggagctttacctctcgcgccaggtcgaggtccagccgtgcttcaaccgcgagttcctcgccaagctgtccgacatcatcgccgccaacctgctcgacctcgagaacggcgccgacagtcttcagggcgaggttgacaaggagctcctcgacgagacgctcgaccatccggttgagttcgaggccgacacgtacgactcactcgacgcgctcgccgaggtcgagactagcttgagcgagggactccaagctcacgagcttcacgggacgctcgaggccttccgacgggcgctggaagacacggcccgactccaggaccagcacgccgaggttgaccggatactgtggaaggcagttctcgagctgccggcggcctttgtcgaggacgtcctccgccttgtcggcagccaaatccggtgggatcgactcgacggcatcaacggccggacaaagctccaccaggctgcctttgccggcctcctgccgctcgtcgacgcctgcatccagcgaggcatctccgtcggtgacaaggacgcctacagccggacggcgctccactacgccacctcgggcggccaccctgagatcgcgtcaagtctgctcggcgtcggtgccgacccggcccaggtcgacatggacggcaacacgccgcttctgctcgccatcaccgagggccgcatctcttgcgtccggatcctgctcgactactcgtcggcctcggctgcgaccatcatcgagcccctgatgtctgtctcaaacgacctgattccgctctctctcgcatgccagtacggccacgaggaggtcgcccgcctgctccttcgcaagggtgcaaaggtgattcccaactcggaaggcctctacccgcagcacctggccgcgcgtgaaggacatccggaaatatgccgcctgctcgtcgccgagggcggaccggcggccggcggcaaggaccgcgaggacaagtacaatcaatggacgccgctgttccacgcggtgctcggtgaccggccgagtcacgtcgaatgcgtccgcgtccttgtcgaggctggcgtcgacgtcaatgcgatggacgagtacggcaagacggccctcttctacgcggcctactatggtgtgcgtcgggcgcttgttgcgacggtcgagtgctcgcaggcgggctgacgttgggttttgtttttttcgcagcacatcgaggccgttaacatcctgctcgaggccggctccgacgtagccgccaacaggattcagtttgctgccaaggcaaagtcaccgctgagcctcgccgtgtcgagtctcgacatgaagggctcgccggcgtcggacctcgacctcgatgacaacatggacgacctgatcccgagcctctcgctcccgccaccgatcgtccctctccaagtctttggtcacaactagtgcgtcttctcctttcccatctcgtctggcatcgaggtctgaccttgtacgtctgcctgcttccagccttgacaagcgatgcctcgtccagctctcgctcggccggccgttctctcgcaaggtctcggcgagcggcgctccggtcccggccgtcaagctttacggcgcgaccgaggagcgtatcaacaaggacaactggtcgtcggtcaagctcgtcatgacgtccaagcctgacatcacgtcgatgccccacagcgttatcctcccgctcgtcgacgagcgcgagacgtttgacttccaggtctcggccgagaacctcccccagttttcgatcgacttttcaatctacccgacctttggcagcaaggtcatcggcaaggccgtcgtcctcttctcgtcgttcgaccacgtcaattcgcaccagacctttgtcgccccgctcctcgatcaccagctcaagacaatcggcgaggtgcgcttcgctgtcttctgcgcgaaatgaggtcgattgactgacggagctctcctccccctctcaggttgccttcgagctcagcgtcgttcggccttttgttggcgtccagctcgaaattggtggtaaggtcgagacttactggaagtcaacgacggtgccgaccttctccggtctcagccaggaccacggccgccgcttcaagccgcatcggccgttgtcggtcgcatcttcctcgcctcgcgttgggggagccgcttcaggaggaggcgggcctgcaacgcctctcgcaccgccgcaggcggagagcggcctcatcacctcgacctcgctctcggtaggtcttgccatctcggtgtcggtcgctcgtgacggcggtggcagaggctgattgcgtcgctctttcccacttgctcagggccaatacatcaatctcgtcgtccaggtcacgcgcgacctggtcccggtcgtctactcgaactgggcgttgcctgtcgatggcttccagctcggcgtcaccgacgttgactttgcccagtttgatcagctcgccaaacgcaagcggttcgacattgacgcgctagtcggcggtgtcgacagctcctcgcccgcggccgactggtaccgcgtcattgccttgtcgatggccccgctcgaccgtgtgctcgcagtgcgtgacttctgaagcagtgacctgtcgatctcatttcgtagactgactcaaccttctattcatctcgctagctcctgccaaatacgctcggcgtcaacctcgagtgccggtacacgacgccgcacgacgcccgccgactctcgttcaaccaccatgtcgacggcaacgattttgtcgacagcgtcctccgggtcgtctacgaggccggcaactcggcttcgtcaccgacccggaatcgcaagatcgtcttttcggcctttgacccgaccgttgcctcgttcctcaacttcaagcagccgaattatgccgtcttcttcggctccttctgcggcctcgcgcgatcgccgccacaaatttcgacgaccctatcgtcgccctcgcgactcgagccaatcgagctcgcagaggaggacgacaagcgctgcctgtcggtccgcgaggccgtcaagtttgccaaggccaacaacctgctcggcgtcatgctcgatgcctcgttgatcgcacaggtgccgcacctcatctactcgatcaaggagtcgggcctcatcctcgccgtctttggcggttcggacggggacaaagcgctcggcaagattatcgcccgcggctgctgcggcaagggcgcgccatcaatagagggcttgccgtcggtcgacgcctgcatgtcgaacgggtacgtctgcgagttggcgcgagagctggagtgtccacttgacgctgacccctcgctcatcattccccgtcccccagtgtcatctcatacagcttctgagctcgaatctacccttcaactttaccacctgagacgaatcgacccttgccacgcgcctgtttgtagaatcatgcacctcttacgaagatcgcccccggccgggtaggcctacactgcctgccgcttcagagtaaaatcggctgcgcgtgcttccatcaacccgagcgccctccgtgaaagctgcctccctcgtatccagctcgcttggctgccatctgcaggatgccccgctgctatcaacgacagagacgtcaggtcgggctcaataaaggcggcaggtgctggctgagactaagggccgagggacgacagagaagccgacgcgccggcggagctgtcgccgaccttccgacgtcgactggtcgacccgcttcgttcgcacctcgacctccctcgcaacacccgcctcccttccccaacacccgcctcgcccttcctacacactctccgcccgctccaagacacgactcgcccgctcaataacaagattctggaatcaagttgatgacatcgctgccctcgcccccgccgcatcacacgctgccctactcgtcgctaccactcgaccatgtcgacgcgcttcgctcaagttgcgggcagcttctcgttgccatcgaggagatccagggcctgatcaattggggcggtgaggcaggcgttataggctggtgagtgagagccctcttcattctgttcgtcgagcagcttcagcgctgacctcgttgatgctcccggtcaggccgactctgctagcggcctatcagcggctcatgtcactcctctcgctgctcaaccaccacatggtggctcggtcgacgccggcgccacaggccaactcatttggcccggtcagcagcagcagcagcaacggcggcagctccaagccgtcgctaacactatcgcagcacgctgtccacccgcacattcctgttgagccggcctccgaagcctggatccaggcactcttgtctacggtccgtttcaccttcaccgaatgagcaggcggtccatcagtcgctgacggcaaccgccggcccaccttggcccccagcacgctgcggtagcgcacgagccgccgccagaaccgcccgtcggcgatggtccagcccatgaggcccggcggcaacgtgccgtgcgggtttgcacggcgctcgccagcctacacgattggaagggtcgggttggcctagtcggtgatgctgagctggacgcggctccgaatgagccgggcgcgcaatacgacgaaggcgacgacgaggccgggatggacgaggacgaggacatgtttgggagtggcgacgagactgatccgacccctccgaacaagagcaagcctcgcgagggcccggacggaggggcagtaaccgaggcagcggtcccgatgctcgtcaaggccgaaaaggagcgagagctgcgacgtctgatggccctcatggcgcggggagagcccacaagctagcatgcgccttgacatcacctgccttcgcccgcgcgcctttggctgcgtgcaagctgcattcagatctcgccgagtagaacgctccacatcgtccgcccgaacgtcgtccggccatcgtcgggaaggtcgcaccggcggcgtgcctcgacagtcatctcgggcgagaagacgccagacgaggagcgcacgtcgataatcttgccgacgatgctcggcgtgaactggaagcaaggggcacgtcagacgttagcagggcgagcgcggcggaaagggcaagctcgtgctgactgacctctgggtgaccctggatagccaggaagtgaaccttgccgtcggggtatctcgatgcgagggcgtggacgagcgacttttccgtcgacgccaagagctcccatgcgccatctgaaggaaggtctacgacgtggtcggcgtgctaaggatgagggaggaagaggggtggacgaggtcagcaccgatgaccatcgccttccccttgccggatccgcctcaccatctgctggatctcgagcgacttctggccaaagagtcggtcgccctcggccgtgcatgcaatggtatacgtgccgatctaccgcggcacacaagtcgggcgtcagcgaaggcgaggacgcaagtgccaaagaaccgaagacgcacctcccagcccttgggattgcgagcgacctggcctccgtatgctcggacgagcagctgcaagccaaagctgtaaccgggcgtcgtcgtcacggtcagcgatgaagcggccggtgctgcgcggcgaagggacgaaccagacgccgatgacgcggacgtgtccctcgttgtcgccgacgtcgcgaaggagcgagaggataggcggcacccaggggtgcttcttgtcgtcaaaggagcatgcagctgaggcgagaagacggattcagctcgggtagggcttcgggtcagggcggcgggccgaagctgaaggtgagctcaccgctgcccgtcatcatgatcgcgtcaaaggcgtcctcgctaccctggacaaagcgtgaccggtctggcagctcgccctggacgacatcgaaggcgtcgacgctaaagtcgatggcatcttgcaggccggcgttgctgagcgagtcggcgagaagcgaccggaaaatggggtcgtaggtcccgtgggcctcgaggacgagcggattgggcgtgtcgcagaggagtagggcaatccgaatgttgcgcttcgacatggtcgcgaaactgtgaggtactgagagagaactgatgggttgggcctcttgtgatggccgtcagtcgtcgacaagcagcagacctcggagtcggccgacagccgagcgccaaaggagggctcggaacgccttgccagcttctccgccaacctcacctccgccttcacctcgataccagcagacatggtggctcctcagactctttggcgcgtcggtgccggcctcggtgcgtgcgcgaacctgcgcactcgacgtcgtatccggggctgacgctctgttctccccgccccatcgccccgtctttctacccgtatgaccttcgcagccggcgtcggcatcatgactggcgcttttggcgctcatgccctcaagagccgggctggaatcacgcccgagctcattaagtcttgggagactgccagtcattacgctctgttcaacggcgtcgctcttctcgcggtctcgatgcaccctcgcttcggccggcacgtctgggctggccctctaatcgctgccggcacggccgtcttcagcggttcgatctggggtcttgtcctcgacagggagaagaagtacgtcatctcaatatgagctctcgtcgcctgctcatgctaacgcctgcgaccctctctgctgtaggttccgcttcctcgggccgatgacccctctgggcggcgtcggtatgatcgtagggcgagtctctcccatctactgatcttcaggtctcgaaggctgaccgtttgtcttgtccgcctcgcagctacgctctcctcctgctatgatgatgtgtgacttccaggacgacattctcgagtcagctcgcgcgccgagcatgcgcgtcatccagcagagggcgagccagtccaccgcgagatgatgtctcctgctggtaggaagacgtcgtgacacctgcagtatgcatcctgtcgcctgctttctctctttccagctgctttcgcctgctctgcgtcttctggttcagtactcagtcgtactcgaaggctgcctgcgtcagggccgcgcagccccggttccgagaacaagagcggctcgaccgtcggccgcctcgccgctcctcttaccccgaccttcacctccctctctcattgcatcccatccaattcaccctctcatcccagtctatgcgcacccgtcggagcctcggagacgacccgccagctacggcatcagccagcaagcccaaggcggaagcgacgacggccgcgcagcgtcggagcagcgacaggcggacgaggacggcgcctcgacaagccgatccatctagcctagccgacaacgcgtcggcgaacggtcagggtggggctgctagagaatcatccgaggtcgagatgaacggccacgatcatcctgatgagccgagcgggggcgacggcgaagcggcagctcgatccgaggtcacgagcgagatcaaagggacgacccagctcaggagtacgtccctaccgccccgtctgatcggtctactagttctccccgcttggtttaagcctagctgattgcagctcactatgcagagacctcgtcgtttgtcgcgcctcagagcccgcacccgctccgcatccagcacccgctcccaccgccatcgcaggcctcgaggacgaccttgcctgcggagagtcacgtcggccgcacccggaatgaatcgcagggaggagcacattcgtctggtgagctcgactttaggctccgcatgtggttcttgttgtgcgctggcctgacgctgcttgggccgatagacgaagctcgtgctgcgcggagccgtcgaggccttagcggcgtcggttcgttgcttctaactcatgaagcgttgaatggagttgctgaccttctccgcccctgaccgtcttaggatcgagctcaggaagtaagcggaaggctgctgcccggcgctctgacgaggccacctcgggtcggcgacattcgagttcggatcgtctgccgccttctgacgcgccggccccgcacccgacggccgtccttcgccggcctccggccttcgagctcccagattcgtccccgctcaagcgggatccgtcagaatgggatgggcgtagcagcaatcaggcgggcgagagcggctcggacgtgacggccggcgcaaaccgccagcgtttcaacttccacacgacagacgacgacgacgcgttgatgctccctgcgcaggagccagtcgccgtcagcaacccctactacaacgacgtctccaagctccagtactggccggacgccgacgtcgggcaactacgcccgcatccaccgacggcagtctctgaggagagcgaaggtgagggcaaagagatgtcttttgtctcgcaacttctcaggctgatgacggctggtgttgcgatccaggctacccgacgacgactcggcgcaacctgcttcccgacctccttcaagccgaatatggcgacgactccgagcggtcgagccctcagcggaaagggcgtgcaccggcgcctctcgcccagcgacatactgcagaggcagcacccggcccctcgcagcgaccgacagccatccctgtcggcctcggtaaggctcagctgccgactcagccagccttggtcgacgccgggtccaacccgtttcggacgactgcgctgccgcacctcggcggacaccggcggagccactcgatggctggccacgagcgggcggcaacgcactcgaccgtcggcggcaggcacgagtcgtcgttcctcgaagccgattcgttcgccgcccgccggctgcactccctcacacggccggccaaggcgcgcgactcgcttggaatgcgtccacgcgctcctcgaacacagacgcaggcgtccccgaggctgtttggcggggcaggtcgccctccctcggtcgccgctttcggccaggcgcagatcctgctcgacagcgccgacccgtgcgtctgtggcttcaccggtggcaagcgtcgacgcctctctgcgctcagcgggagcgatggccggctttcggacgatagcttgctcagcggtgatggcaaggagaactcgccggcaagcagtggtaggcttggtgactgggaggcgcacgcgaagaggtgcgagacgcttcgagagatgcgtgcgcagggctggcgtatctacctcgagatttgaaagacgaacatgggacggtggcgcaaggccctctgattgtaaagactcttgatggaccccttgcctgcagatgacgccgcctgacggccgtcgcggctggtcgtctaaagagaagatgcgatacgggcatgctagcgtgcgaacacaacagtggtgggtgaaagggagccaaagcagaaaagatgaggggggagcgtgcagagcaggcagagaagaatgtcaggacgacgaaaaggctactcgtgcatcgcgacgtcgtccatgttgtcgacgacagacgtcaggacgtcaaagacgccagtgccgaacgcgccaggcttgccgagaacgatgctcgaactcgggttgctgagggcgtcaaagtcgccgtggagggtcgcgtccgagaggaaggcagccgtcgtctcgaacgaggccttgagcagcggcgacgacttggacgagataccggtccggttaaacggcttgtagccgccctcgtgggtctgaacaaaggcccaagggtatggtcagtgagcggcccgggctatcagaaggtggagaagcagcgcgcaccatgtagtcggcaatcagcgagagatggcggtagttgatcgtgatggcgtagacgccgaagacgtccgagacctcgcggatgatgctcgcccgggcggcctcgacaccgtagttgttgaggatcgaggcaatgtcgttcgagcggatgtagttgaggtcgacgagctggtgcgcgtgctcccacatcgactggaagttggagccctcggtgaggagcgtccgcttgccgtgctcccacgactcgtcgtcgcccgagccagtcttgagccggatcgcgcgcgaaatgtcaggcacctggtgaacgatggctttgcggcagcaccgctccatgacgtcgacgatgagcagcttctgcgagtcgccggggaactattcatacgcgaacaggctagggagtcagttttgccaaagaaggtgcaagatgagcgcggacgacgcacctgaagttcaaactccatcgtcttgccctgcttgaggtcgaagctcatgctggcgacgtacttggccgtcgacatgaagcgcgtttcgaagtcggtgacacgagcagccatcgcgatgcgctcggcctcttcgtcgacatccttgtcatcctcgtcgtccgaaaaggcggcgtcgaggtcctcgaggtcggcgtcgctgcccgaatccgagtcgtcctcgtagctggcggcctccttggcgttggcggcgcgcttggcgtcgtcggcatcgccgtcgttgccagcctccgagttggcatcgtcgccgccatcgtcaccttcgtcggccggggcgtcgacattctcgttgacggcgcccttgggcacgcggaccgacttgcccttgccaaggccttcgaggtcgttcttgaccatcttagaaaactccttaatctcacgaaacacctcgttcttgatgtgaagcgcgaatgatcccggcagcgattcaaagatctgctgcggcgtcaggttgtgctcgtcgaggatctccgtttgcgggaagaagtcgagcaggaccgtgtacgaccgcgagcgcgagtagccattcgactggctcttgctcgagagcttctccgtgacggtgaccttctcgacaagctctgagagcgtcaccttcttgaggtccttcgacaggagcgcgaggtcgtcctccgagacgtggtcgaagatcggcagcttcatcgacggcgtcttgggcttggacgaggccgtcatgacgagctctcgcagacgagggataccgagcgtgacgttggcggcgccgtggccggcgagatggaaggtgttcagcgtcatctgcgtcgagggctccccgacactaaaagcacacaagggagggtcagggtgtcagtgagggtaggcagcgaagtcgttcgagcagggtgacgacgcacccctgggcggccagcaggccgacggcctctcccgggtcgatgagcgccttcatgtagcggagactcatcataccctggaacttgttcttcttaatgccccacggcgtctggcgcttgccggcgctgtccttgtccttgttggagagcaggagcttgtccttgttggcgtcgacgtaggcgttgaccgaggcggcgtacttctcgccggtcgagccaaagaaaagctgcggcatatacttcgagagcgaggggtcgtaccggagcggccgcttagccgccttcttcatgtaggccggcgccgtctcctcgtcgagccgtcccttgagcaggccggcgtcgtgccgctggaggagcgactcggagttttgaatgttgaacgaaaattgcttggggtcgaggtgggcctgcttggtgacgtcgaggccgtcctcaccgtagaggaactgcacaaccgagccgtcgctgtcgcggaccgtgtggtcgtagtggacgcggatgccctcgaggtgcttgatcagacagcgctggaggtagcccgaccgcgacgtcttgacggccgtgtcgatgagaccctcgcggcccgacatgcagtggaagtagtactcttgcggccggatgcccgtcaggaagcggttggcgacgtagccgccggcgcgcgccgccgtctcaaacggcttgaacgacggcagcgtcttgccgctgaccatcgtcgggacccgccggccctcgagcgactgctgaccgaggaccgacgagatcatggtcgcgtttgtggtcgagcccttggcgcccgagaccgtcatcatctgcatgttgttggtcgggaacgacttgacgagccggtgcgggaccatcgttgagttgaccttggatgtcgtgccgccaaacttggcctgcatgacgttgtcgaggccggccatcagccggtcgtcgcggaggatctcctcgagccgaatttgcaggttgtggttggtatcggggtcgttcgggtcggcgtcgccgaggccgacgtatgagatggcgacctgcttgccgtcgacgtcgacgttgcggagcatctctttgcgctccttctcgccctcgggcgtcaggacgagatcgtccatccggcacgagaaggcgtcgttctggaggaacttggagaagagacgcgagaggactgagaggagcttgccggccgtctcgggcccgtagacctcgaagcacgagtggacgagaccgtacgagctcgcgccaaactgcgacttgtcgaggatgccgatcaggagctcgccgtcgacaaacaggacctcgccctcttgcgagtgcggaccccacagctcgctcttgaccttgttcttggacgtcaggttgaggccgctcgcgttgagcggcttgatgttaagcaggacggtcgagagaatctgcttgcccgtccagagtggccgcggcttccagacggccggcgggagggtaacaatccggccggtcgccgtgtagtcgtcctcggtccggagcgagccgtagagcagctgatggtactgctcgcgcgtaaagaacgagttcttgttgcacatccagacgccggcgacgacgtggtcctggatgaggccgcggagcggggcgcccgaggtcgggacgaggtactgcgagtcggtgttggcaatgttgtagccctcggcccgggcgacctgcgactgggcgaagtggatgttcatctcgtcgccgtcgaaatcggcgttgtacgagttgcagttggcgtagtgcatccggattgtcttttcgccgagcaggaccttggccttgtgcgccatcatcgagggcttatgcagcgtcggctgtcggttgaggatcagcatgtctccgtcgcggaggtggcggaagaccttcttgttgatagcctgggtccgggtcgagaggccgccagtcgagtaggcgccgtcctggggcgtcagaagctggttggcgagcgccgtccgctgctcggtcgtcatgcggtcctgaggaagaaggaaaaggacatggtgtcagcctcaagatgggtgttgcaagaaacagcaagggctgctatagacgcacgagcgagatctgggcgccgtcctcgttgacaaccattgacgcgcccgggtagacggtcgggccgttgatgacggcctggcgcatctggttgatgttgtggatggtgacgggttccgggaacgtgagcttgcgggcgaagacggggggcacgccaatctcgtttgtctcgaggttgacatcgggcgaaatgacggatcgcgcggcatagttgacacgcttgccctgcaaaaggtgagaaacagggccgtcagttcctgtttcagggtcagacgagtggggacgccgaagaccgtaccatcatgtgctttcggaagaggccctccttcttctcgaggacctgcttgacgcccggcggaggagcgccgccgccgcggatgatggttgggttcttgctcgagtccataaacgagttgacgtcgacctgcagctggtggacggcgtcgagcagcatgctgtacacacgccggtgctcagccgcgagcaggacggccgacagcggctcgaccccgtccggccccgtcttggtgccgacgccgcgcatctgcgtgttgaggtcgcgcacgcggaacgacgtctggaggatacgcagaagcgagtcgttctgcgggttctcaaagacaatgtcggccatcttagacgccggtcggaaccgcgtcggcgggacggggaccgccgccatgaaaaagatgtcggccgaggccggcgggagcgacgcgtacggcgacgacgacgagacgttgcggagccgctgcgacttggcaaactgcccgtggccgccgtagaggagggcgcagacgacagcctcgttgcggaagagcaatcggaggtgggcccgggcctcctcgcacggcatgacacgctcgagccgctttttggcctttggcgcgtcaccctcctcccgagcggcgaccgcctggaccgtcgcatcgagccggtcctcgacgtccatgtcgacgtcgccgctcgcgtccgaggcgtcgtcctcgcccgcctcgctgctctcgtcgctctcctcactcgctgagccgtgcgcaaagccctcatcaacctcgcccgccgcgagcttctggtcgagtgcggccttgcgctcaagcgcgagcacctggggccggatgcgcgactgcatccggtggatggcagcctgcttggcgaccatctcgagctcgacaatcttggtgtggccctccttgcggtagacatgggcgaagctgcgcgagcaaaatccagaccaggtcagttcccagcggcggcgcgaagctatggggcgggtcgagagcgaactgacgccttgcagctgtggcacttcttgtagccccgcttcgagaactcagcgatgaccttcttgcgctcgttgtagacgaggtcgtccttgtaggcgtcgcggctgctgctgccctggcccttggcctcggcaagcgcttcgcggacaaacgcctcgacgcgctcgatgaagcgctcctcgctctcggcctcggcgtcggccttctcaagctcgtcctcggccgcggccgcagccttcttgtcggccgcgttctcctcgcgcgtcttgttgggcttctcgcccgtcagcttgggcatcgacgagaaggcgccgagctcaagcgccttggagagcaggccgtggtcgagaagcgtgagccggccgacaaacttggacgtctgggaggattcggcaaggtcagcaagccgtcttgtcctgggcgccagagacgttgcagaagacggacctcggccgcagggccgcggaagcggtggcaaaacatgcagcattggcgaatgagcgagtacgcctgggcaaagaagagcgggtggtagactggcgtcgggagcgaaatgtggccaaagtggcccgggcagtcatacgacgacagtcggcacgaagcacagctgtgaggcggatagcacagagggtcagccactcggcacaggccggtagagccgggctgaagcgcaggcccgtcctggcccgttgctcccccttgagagccctcccgagccaacaaggcatacgcacacgtcgccccgctccatcggtccaagcgcagggtcatagagaccgccgctcgtcggccggaggaggttgtcgaagagcgtcgggttgacaatctgcttgaccgagatccggcggaggtcctcggtcgtcaggaaagagaacgacagcgacgacggcgtcgacggcagcgactttgagatgtccatcgcgacggtgacggggggcccgagggctgcggagagtgtgaggacggagggagctcgggctgctgctgctgctgctggagaggaggagcgaggcgagcgtgcgggggcagaggcgaggccgacgcaggggcgaaattcgaggactttaggatttttctcggcccggcgcgtcgttcatctcgtctccggggcatgatcttcggccttgcttgcctctccctcatcctccctcgcctcctcttattccctcactctcccttaccctagacgacgatgctggccatcgctctctccttgctcccgctgctggcgctcgccgaggccactcggataaatctcgcccaccgtgcgccggccgactcgctcgcccccttcgaccgcttcgagctcgcgcttgcctcgatccgctcaaagtatgccggcgtcctgccgcaggttgtccacgggaggcgagcgcccgccggcgaggtcggcctcacgaatctctatgccgacgcgtgcgtagccgctgtcggtcgatctcctcatagcggcggaagctagggctgatatttccggcttctccctcccttgctcgccctgacgtgcgtgcgcaggacgtacaccggggacatccagatcggcacgccagggtttgccgagcacgcctcgcctcctctgctaggtctggctgctgacgcgctttacctgtccgcgcgtctcgccctataggcagtcgctctcgctcattctcgacactggtgcgcgccctcgcccagaaagaacggctccgcagcactgcagccgctaacgtgctgacgcgctagctgcgacgcgctctacctcttttttctccaggctcgtccgacctctgggtgtcgtcctcggcctgcacgacctgcacgggctccgacgacctctttgacaacgcaaagtcgtcgtccctgaccggctcgagctcggccttttcgatctgtgcgtcttctccccgtccttccgccacgagccaagggtttcagtcgcgcgcgcagtaccctcagccctcgacccgccaccgattccttttcacaaggagcctgcttggctcgaaagtgccgttcggagctgacccgtcccttacattttctaccagcctacggctcgggtgctgccgagggccagcttgcgactgacactgtctcgctcggctcgttcaccgtgtccaggcaaactttcggtgagatcgcacgcgccaaccccacctccaccccctccgtcgtccgactcgtcgctcacaagctgtcgccccttctcgtcctttgccaggcttggtctcaaaggcatccaacaacctcatcttttcgcccatctcgggcatcctcggcttcggtttccaggcgctggcgcaaagcggcgcgacggtacgttcctgacggcttgtcgtcccttggcgcctctctctgacgacaacatctcctcgcagccctggtggcttgcgctcgtcgactcttggccgtcgcctctatttgccttctatctcacccggcacgcgtcctcaagcaacaacattaacccgggcgggacgctcacgatcggctacaccgacgactcgctttacgagggctcgatcgcctttaatgcggtgacgagccagacgtactgggtcgtcgcgctcgacggtgctgtcgtcgctggcgaggccgtcgccttcagcggcaacaagggcgccgcaatcgacacgggcacgacgctctgtctcggcccgctcgccgacgtcgcggccatttacaggcagattccgggcgcccgcgaggtctcggccggctcgtgggtgctcccttgctcaacgacgacgacggttggcttttcgtttggcggggtcgtttacccgtttgctgcgtcggacctcctgcgtgggctctatcaggccggcggctcagactgcatcggcgccatcaccggcctcgatctcggcaatggtgcacccatggggtggatcatcggcgctgcctggctcaagaacgttcgtccctcttcctatccaccgtcccaaagggacatgtctctccgaggctaacgagtgccctttcgtctgataggtctacacggtcttccgtcaaagtccggcttcggtcggctttgctttccttcccggcgagggacctccgcccgcgacctcctcgacgctcgtctcgtcctccgccgcaagctcgtcagcctcgtcgtcgtcgtccgcccggccctcctcgagctcgagctcggcatcgtcatcgtccgccagctcggcctcgtcgtcgatgacgactagcacctcctcgccggcggccccgaccgaggtcatcactggcggcatcgttacgattggcattcccgtcacagccgccgacccgagcgcctcagcctcgattgtcagcgccgggtcgacgacggccagccttggtggcccgtgtgcactcttgctggcaggagccctcggcgctctgcttttgctcgctcagtagagctgccccttcctttctcataccactagatcttatcctcagcggcatcgccccttcccccatctggactatctgccggcctaccctctatgccggcgtgtaacactttagactaggccgctcccttcgcccggcgtttgtatctgtattgcttctgcttgctctgtcctgggcggcgggcttgtcggcatcagaagggcagaggtacaacggagagactgctgggcagataaaagaagcgacggcagtgaaagaccgtcgcggtacagctgacacgagcggcaaacgggacaacaagaaggggggagagagcagagagagatcgagtagaggagtgatgagaacgtggaccgctgattcccatcagcgcgtatccccatagacagcgtcccaggtggcctggcgatcatccaagctgcatcagtcgacgtgcggatgctgacacgcggcagggagcgggacggacctcgaactctagcagaaagtctgcgggccggtacgtccgccagtcgacgaggagctgctcctggctcttgacgagctggcagtagagcttgagcggaaagcgggcgatgaaggcctctgggatgtcgctcacgcgaatgacgcgcccgctgacggccgtcgtcacctttggcggcggcacatagagccagtcctcggtgacgacgggtggatactcgtcgtgttcctcgtagacgagctcagtgtggaagtggctgagcgcgagtcgggcaagcgcaaagtgctggacgacgacggcatgggcaaagatgagggcggcgtgggacgagaggtgcgtcttgagcgcgtgcgggagcgacaggcgcaagatcgatgagtcgagcttgtccgccagcttgagagcactgtggcaacgacagattggctcgtcagcatcgtgccactgaggagaacattcggggatggactcgcttgagaaggttatcgatgccccaccagggcgctgcaaagagtgcgccaggtgtgacgaagctcataaagacgtcgagcccgtcctcggcccgctcgtctacctggagaacctcgagcttgccatcaagactgggaacatcatcgcaggtagccaggaggtcggagaagacctcggatccgtaggcgagatgcagccgcctcgtcgggtacggccagccgtcggccgagcgaacgacgatgtcggccttcctttggaggccggcctcgtgcgagaagtactcctcccgccatctgcggacgtcgcgattccgctcaaggcgacccatcgaggcatcgatctgggctgcgttgctgaccatggcgctcaaggcaggggaagcgtgtctgagaggatggtaggcgggagggtgcgtcagccgactgcgcacgagagatggccggcggccagagatgagaatggaaacagacaggcttattcgataggcagactgcacatcagagacaggcggaggcgctccactcattgatgccgccgttgaagaatggttgacagagttcggaggggaggcaagggcgcttggaggtctgaaggcaagctggtcggacgacggataatcaagagagcgccgccaacaagacgactggtccagaggtcagtttgatggggacgacaaggcctcagcatcgcagagctcaccaatagcagcagtgactggtccctcgaagccttgatagctggctcgccgttgacgggcagacgacttcatcgacggccgcccgttcttccgttcggcatgcgcagctccgagctggcgcctccgacggccatcacgaacgaagccctggttaccctctcccttcgactcgggctccaacatgtcgcgccaacagaagccgtcctcgcagggcgggtcgggcctcaagtccagctcgtccttctcctcccagattgcctcatcccttcgcacgcgccgcccgtcggccgcgccaaaggtctcccagccgccccacttcagcggcccgcctcccgccggcgggtccgacactcggcgagcaagagccgtctcggacaagatcaagagccggctctcggtccgctacgcagatggaccgctgccttcgcacccgcctccgccggtaccgagcatgccaaacctctcaggaagccggcggccgacgctcgttgacggcggcgcgcccgcagccccggacgcatggtcggcgcccgaagacgtcggcgggtcggacaacgagggcgccggcatggctggcttgggcgctggcacgagcgacatgggtctgcgtcgcgacccgggccaggtcgacctgagcgagatcggcaaggacggctttgacccagagagctgtgcgtcgcccgcctcttgcgcgcgtcgcgccgtctggctcggtcgagccgacggctgatctccaggcattcccggcctccgcagatctgaagacgaagctcgcaggcgcgtccgacgccgaaatccgggcgtttgtcgaggcgctcgagaagagcaaagtggcgacggcggaagatgtgagtctgcgagtggtccgcctccgacaccaggccgagccctaacccacgcctcttcgatcaacagctgcagaagagcgtctttaaaaagtgagccacctgggtcgaagtaggaagtgcccagccattcgtgcgctaatcgtcattgtgctcgcctgggactcgcgtcgcccacttcagctacaccgagttcattaccatctcgcgcgagatctcgacgctcgagacgtcgctgatagagctccagacgctgctgcacgattggaagtctgtgcccgagtcactctcgggtctctcttcgtttgcggccgccgacgacgcgtcgcagcgcaagtcgagctcgtcctcgaccgccggaggaacagctgcgagagacgccggcggaaacggctcgcgccggagctcggtcgccgacctccagagcctgtatcggacccagctccaggcgctctactcgcaggtcgccggctcgcagaagttcattccaatgaaccccggtcggcatgtcgtcgccgagacgggtgcctttgtcgagctcaacccggcgacgtacaagcccaaaggcgctgtccacctcttccttctggacgacctcgtgctcattgcaggcgtcacgcgccggctaggtgggagtgagaagaagaaggacggcggccgtgacggcgacgacggcaagctcgtcgccgaaaagtgctggccgctggccgaggtgacggtcgtcgacgtcaaggactcgaatggttcgtcggaccactatcttgcgcaggttctttcgtgcccgctcgctgaccctcgcgctctcctcggccgaccgcccggtctcagagctgacgcacgcgatcaaaatccggcgcggcaaggagacgctcattttccggaccgagcggcccgaggacaagcgctcgctgctcgtctcgttccgcagggtggccgaagagctcgctgctcgcaagcggcgtgagattgagaaggagcaggacaagcgtcgaacgctctggcagggcggcgactcgttttcggcgcagggcggcggcgttggaggcggcgttcctgcgctgccgggcctgccgggcggcgtgcctcgttcagggcggctgggctccagcgcgtcagccctgggcgcggaagccaacgtagccttgtcgcgagcaagctcgctcgatggctcgcggggcaaggaggtccgtttcgtcgacgagtggacggacgaggtgacggtcgcgcttgccctcaagaactgggaggaggccgtcgagctcatcgaggaaggtgcgtgtacccgaagcgactgagtacggctggcttgaagggcaactgggctgacctcgctgtccgccactcgaccaggcaaggaacgcctggccgactttgtcgccgctgagacgaacgaccccgtcccagccgtcatgctccggcagcgtctcgcggcccagcaggatctccttctcgcccagctgacgacagccctccaggcgccgtcgatccgcaagccggcgctcgtcacgctcgtctcctacttctaccggctcggtcaggccgatctcgctcgctcgacatttctctccgctcgaaccgacgtccttcgccgacgggtcggcgaggtgcgatgggagcgcggtcagacggttcaatacatcaacgagctcgccgtcgtctggttcatgggcgtcagcgtcactgcacagtggtacttgcacgccttccgcgagaacggcatggcgagcggtgagtcgggcttccactttctcgacagacatggacgactggcagcctgtcggaacaacgctcacgcctcttccctcccttgtcacgcaccgacaggtctcgtcaagtggtcgaaggagcaggtcgacggcttcgctggcatgttcaaggagcaggtctacacgccagaccaggacccggccgtcgtcgccgaggcggtcgacgtcgtccggacgctcagtcgcaagttactctacgacatcggcctcgacctgaccttcctgttccgcgacggcctgatcgaccgccggggctcggccgcatcgtccgttgtcccttcgagacacccctcgccgccgccgccgccagagctccccccgccggcatcccatctggctcagcaaccgcacgcatctgccgctgccacctcttcagcaacggtgcagaaggcgtcgcccgaaactcgagacgatgacggcgacgacgctcgttccgtcgccactgaacctcaagcgccggcagtgcagccgcctcgactgtcagccgaccggccaattgccccgaccgactcatcggctgcgacttcagcctcgattccgccgcctcgaccgccgagaagggatcggaaccggcctgttgccggtcaggagcgtgcagatgggtcaaggcaggcctgagcaaggcgatcagcgcctcctcccattaacgccccgctttcaacctccgtctgcctctcaacaagaaacgcgttgacgggagctgaggcgactggcggtcgcgatgacggttgagcgagttaatcgagcgagaggaggtaggctagagcgactgagagggaggagatgcgcagcaggctcgacccagatgaacggagacgcggagcgctacccatcgacgggtcttgaagacaggatcctttcacttgagaagcactcattcgcattacgggtcatctacaaccatgggctcgacgtcgttggcgcctgcgatcaaggcggcctcgccaaggtgaccgggcaggtgttcggtgccgctagcggcgtcctcggcctgcgccctccgacgggcctcccgctcggcgaggggcagcgtccagagtctagagggagaaataagagcgtgcaagcgtcaacggctggacaccacgccttgcacaggtgggggtcgagcaaagaggcaaagacgtactctccgtcgagcgcaaagtcgctcttgaactcgagcatccgtggcgggggcacgccccaggggaggaaatgcctggccgcacggactggtgccggcacgatcgccttggccttgcctggccggactttacggctaggtgctgtcggtaccggaacgacggcagcgtgaaaggaaagcggaggcggcggcggggtcggtggtcggggaccggcaggcagtttggaaggcgcggagagctcgaccggctggactgcaggagagatcagaccaacagcgggttgcgacaaagcctccattgacgggttcgatgtaggtgccgacttgttcggtgggagcgagatcgtcggctgggcgaaggcagcgacgaccgggccagcctgctgctgctgctgctgctgcggctcggtcaaccgccggcggtcggccgctaggatctctggcacgcgccgattggcctcctggacgagcgcagcccggtccgagtagcgctcggccggctggatgtaatagtcgacgtggacgtagggcacgtagactgcggctggcggcgcttggcggtgcgcatcgctggcgccctcgtcgtcggtgtcggcgttgatcgcatgggcgagagaggtccccgcccgccgttcgatcgatgacctcctcgaccgcttaccgtcagcgctgccgcttgtccgcagcgtgattcgtcgtggctggccgtcggctgtgctggctcgtcgaccgtcctcggacgtcgaggccgaccgtattcggctagctcgcgccgcgccgctacctgatgctgttgttgccggatctgcaacagaagctcctgctgccagaggcgtcatcggcaacgacaggtggccaaggcggagcttgatcgtcggcgtgccagaaccatgtcggcgagcagactcgcttgcgcttgacgaaaagtgggcagaaccgggccagccgacggacgacgccggtgcagcggaggctccgctcgagagcgagaggcgcgaggcggaccggccattactgctggcgccagtatggctcgagctcgacgcatgagcaaatccaatgttgccgttggcggcgccggtgtgactgctggtggcagcggcatgcgcctgtggaggcggcgtcgagtccgattcgtcgtcatcgtcaagtgcttcaagtcgccggctctgagcctgtcggctgatgagacggaggaacagaggggcacgccttgtcagtcttcgtcagtgatcgcgactggtagcgctgggtgagtaaaagaggacgaggcacgcacgctcgctcgctcggtagcatcaggtcatacttgacaaggagctcctccgcctcttcgagcattcgcgtccggacctcctccggctcaatcgacggcaatgaagtttgcgaacgctcctcggtcagtcgacggtcggtccggtcttggccgatgctgctgacgtcttcggcgttgctgtcgatcatattcggcagcgaaccaacaaggttcgcaaagctatcaggaggatgacgagaaggtcagttccgactaggacagctggaaaccggagttcgtcgactcaccttctgctgtccatcgaccggatgagctcggtccgctccttgagcttatatcggccgtgccggagcgcctctcgttcgcggaccttgagccgccgctcaaacgcctcataccgccgatggaggcctaggaagaaggcgtcgctcatagcgctcgattcggcctcgtcctgcagggccaacgctgtgcaggggcggcggagcgtccggccggtttgggcggcggtcgaggatgacgacgagcccgggcgggttgagtctcctcgccgctcgcgcgcttcataggcgatagcctcggcctcgtcgtcgacgacaacgaacgacggcccggctcccgccccgacgacggcgtcagtgacggccgtcgacggtgctccttgaccggccgagccaacgtcatgctcgtcagcgacggcggcgggttcgctctggagcgcaggaagcccgagctggccgacaaaggcgacgaagggcgggccaaaggccatccggggccggtttgagaggaagacggctggcggccggttctggcgctcgacgtctgctcagggcgaagcgtcatgtcagcaacttcagcctcgacgcctgcgcatccccgtgaagaggataggaagggccactgacgtagccgatctcgacagtcatggacgagccgcctgatctcgaccttttcggcctgggagccgacgcccttgagccctgcgttggaaccaaggccggctgccgaccgactccggcgaggcgcgacgggcgtgctctgtccggcagcggcggcggcggcggcggtcggtggcaagggagtggagaccgaagtgcgggaagagggaggaggggtagaattggatgagcttccacgaggcagatgagcaggcagccggcggttggccggcgcaggtactgaggctgaggccgaggaagaggcgagggtgccggctgccgccgccggtgttgctgacttgaccgtcggctgtattggagccttctcagtcctcacagacggtaaccaagggtcaaccgactctgcagacaccgcggctggagcgggttgtgggctcggcggtcgggcaggtgctgcggctgcagccgaggtagctgctgctactgctgctgctgggaccggagccgttgcgagtcgagtcgatcgcgcctcatcctcgtcattgtcgtcaattatgatggccgacgaggacgagaggcctgagctgaccctggacgaggtagctggcaactgctgctgctgctgctgctgtcgtcgggcggtcgctgagttaacggcggaggtcgaggcggcgatagtccgacgagcagacagagctgctacagtcggtaccgctgaggcagcagggaagccgaccggctgtgaaggcgtcctcgccaccgacgtctgcgtgcctgatgatggcagtacatccgtcccagtcggcctttggtcagcggtcgtcgtcgtcggcggcggcggcggctgatgcttggcgaatacgccgaacccggcggcggcggacggaagctgccccgctgactgttgctgcaccgtcgtcagactcggttcgtctgcgagcaggtccgcgaccgagaggatgggcatgcgggcagcgaggagtcgggcaagaggtgagagagcgtgtgcgagaggacgacgaggacgaggccgacgcgtccgcagtcggaccccgcagcgcgccccgatcgacgcgccgcagggcttttttgggccgcgcgcgcgcgcgcctccccttcccttcgtcacctcttcccccttgtcgtcaacgcaggacagcgactgacaagcatcgacccgacacaacaagcacttcgacactggaacgcttggcttgtccccgtcacgccctcgcttcctccctcaagccatgacgccgcgctcgaacggctcgctctacccggaccagcatccggcgcaggccgccgcgtcctttgacccctactcgccaatggccgaaggcaacggcggctacgacaatggctcgacctactcgcagtcgcccggccggccgacgctctactcggacccgtcggcaccctcactcggtcggcctgtcggaggcgtccgccagtcgttcgagtcgacgaccggcggcggcggcggcggcagtggccacgcaggcgtcgttggttcgccctttgccgacaacgccgtcgagggcagcagcggtgcgagcctccggccgaggaaggctcatggcgcaggcgccgggcagggccagcgtgagagtctgttcaacgacgtctacaataacagcgggtcgaggtcggtccttccgcctcctctctgatcgccccaccgcacgcgcgccacacgacctcggctgacgacctatgtttccttcccgtctcgcagcctcgctttgccccagcggccgttcctcgattcgtcggcctcgtccttcaagtcgtccgggtcaggcccgacgacctcgtcctcaaccgcgctcggcactggcagcgggccctcgcgccccctctcggtccactacctcccgcagaagtaccccgagccgcacaagcagggccaatgggcccaccggcgctcgcaggcaccacccggactacgcaagacgggcggtggtcgggccgccttcgctgcgcacgaggaccgactgccgtcgagcgacggcgccggcggcatcgacggcaacagcggccgcgcaaccaccgacggcaagggcaagcacaagctgctttggaaccgcttcaagtggacgctcttcgtcgccgacaccattgtgcgtggccttcatgacctcttcctcgcggcatcttactgacctggcggcttcgcgcattagctcctcgcctactctatcgcggcgctcgtctgctgcctgctcgtctggttcaacgtctggaccaacgccgactcaattcgggtcgccaacagggacctgctcatcagtgcgtccctcttgagaacctagcgtctgcctcgattgcccgactgaccgtccggacgcccacctcttgcgactcgcccagtgtcgaccgtcgcggcctgcctctgcctcgtgacgtcgctaatcggctatgccggcgttctcctcaacaaccggtcgttcctcgcgactttcaccttcctctgctggatttgctttgctctcctcgtcgtccccggctacgtcgcctacaaaaagtcggccttcaacctcgaaggcaagatcaactaccagtggtcgcgcgacctcgggaccgacggccggctccggatccaggaccagctccgctgctgcggctactattcgccctacatcgaagcgaccgtctcagcgacgtgttactcgcgctcgaacctccccggctgcaagggtcgcttcctgcgcttccagcgcgaggtcctcatccgctggtacaccgtttcgtttgcgctcgtcccggttcagctggctattaccattgccggcctgctctgctcgaatcacgtcacctaccgcttcaccaagggcctgacgcccaagcagtaccggctcaacctcgacagcctcgcctttgtcatggacggctacgccgggtacgccttttcgctcctcacactgattctctgctgagctgacaatcacctcctgcttgttccttctctagcgagattgccgccgcctatggacccgaggtcgcgtacgaggccatgtctgcctcgcagaccaacctcgccacgctccagtactcgaaccatgctccccagggccagggccaccggtccaagctctcctggtcgggctacaccacgccggccggcggcagctcggccaatccgtcgaggacgtcgctcggccagcacccttcctatcctccgacgacgacgggcgacgactacagcatgtcgcagctcgggagcgaggtcatcatcgacggcgatgacgaggaccggaatcgccagcggagaaacagcctgagcgacgaggacgaagacgaggaagagcgcgtccggctgcgtgaggccgagaaacgcggctggtactccggccgggcgttctagagggtcagccgaccctcggcctcccgcaactcgctcctcacccttactcgccgtccttgcatctgccgcgcgccctcgttgtctctgtttcttgccgtttcttgcagtctttcaacgacctctcgctctctcatctatctctcgccctcgtacaagcacatcgaccgcacgacctcgctctctcgctcttcctccctctcgaacactctcacccgagcagactagactctcacccctgccacgctttgcactctctctctgtcctagatggaccagtcgacctgccttcactctgccatcttacagtcactgtgctgaaacgagcgacgcgctatcaaaaagaggcctgctggacgggtgaagcggccggtcaggcggctgcgcgccgagcaccaggcgaaaggggtctggccaaccgtattcggcctcccgacgtcaaccccctcctttctcaaccttccgcacctgtttctagcggtcactgccaacctcttcgccccgccatccgactctcgcctctctgctggatcgagagctgcccaaccaagcagcagccaggcccgctgcaaccatcaaaggggccagtcgcactcctcggccttctctcgccagctcagacgcagcactcctcaacctcgacgccgcgtgagaccgtacgacggtcgctcgcgctcaggtccctcccgggaccttcggcggccaggtcagtcgccgtccagactcggcctcgcctggagggccgacttgcatgccgccgggcacgaccgtcgcttccggactcacgcgccgccgccgccgagggcagggtgtcaaagcacgccagcccctcgccagcccgacccgaccgagggctgggcaatccaagacggatgggctacgccgaactcgacccctgccggccctcatccggcggcttcatcgtcgacacgcgcggcgacggccggtcactcgtcgggtttcttggatcggattgctgtcttgaagcgatggacgactggtctctgccgatagcgtcgcagggcggtccgacccaagcaggtctcggcgagcagtggctgacggtcagtctctggaggggaacaagcgcttgagagacgcctactgacgacctgctcatcctttccacagagccgtccacccaagagctaggtgccagctaccgctccaccgccaccctcgaccccgccggcatccgcgccggcagtcgaccccgttgaagctctcgccctgcgcgtcttcaacattcgcgtccgcgtccgcgtccgctcgctagccgattcggtcggctcggtcgtcgacaagtgggacaagaagcagcgccgctgggcggctgaggaaaaggggagcgctacaagcggtaggacaagaagcgcaaagcggcgtccgtctcggccgacggccaggtcggcgctaaagcttccttgctcggagacgcccccttactcgacaaagcgccgctggtcttgcccatcccagtcgagccgccgccgccgtcgtcctctcacgcagcagggagggcaaaggccaaaaagagggctcgcgatccgacaggcgacagccgttcaacgccagcctgctcgcccggtcagcccagcggccgatcatccggatctgcctgcaagccggcgagcttactccctccgggtgtcatttgtacgagggacgttccaccgtcccaagctcgtcccctgccgaagatcgctcgcatgtcggccccaagtcgggtgctcgactcgtccggcgccgattcctcaaaggacccgaaccgccgtcccaactcgtcttcctcgaggccccgcaactttcgacccttcaagctcgatcctcgcgtcgcggtccaggtcgctaacaaagtcttcgagctgtcagacagcggctcggatgacaacgacgtcgagtacaccggctccgcttcaggcccgtcacgggcgccgacgcgacaaggcactccggtgcgcagacgattcggattcgaatctgcgtcccctcgcagattgtcactgacgacagtctttctcgatcctcgtcaagcaggctgagcgagcagagcagacccacttcgctgcacttggtcgacgacgacgacatcgtgcgttctatctctgcgtctcgccaatgccctcgatgctaacatgctgccccttttctcgcagtcctccgtcccttcgcgcgacgacgagagagagccgtcgccagccggcaccgtcatcatggagcccatcggccgggcgatgaagggcaagggctcggccggaggagactcgtcaatgacggctctcggcagcgccaacggcatgcagcagccgacaagatctcgcgcgacgacggcggcggcagggtggacatcggacgtcgcaggctccccgccgcccacgcaggcggcacctagcgatgacccagagcacccaatgacggccaatacgtctcagcggtgcccctctgacgcctcgtcgccgctcagcgccgtcgggcgcaagcggttcaaggccgagcgctcgtcgaccgtggacgccagcgccgttccaaagccggacgagcggcgattctcgaccctcgaaaacgcagcctcaaacagaagcgcgctcgctctcaccggctgaaggtcgcaataacagccggctgcctttcggcgcgcctgcgccccttggcctgacctacgcgaccgagtttgagctcgttatcgaccgcggcgtcgagatcgtcctccagcagatcgagtatggcctggccggcccaggagacgcgtttgagcactcgaccgggctcgccgcttcgagaaaaggcgcgtcaccagcggcggcggacagcggagacgaagatgaagggtcgctcggcggtcaaggcgcgagcgttgccgggagcgatggcagcggtggtccgtgtgcgagcgagacggcagctgctggacctggcgattgggccgacgactcgttcttcgccttctatgcccagcaccgacccgaccgcttcgagggctagtctgccgaccactgctttgagaatatgcttctcctttctgttcgtttgccagagaccaagagctgccttggaaaggaagagcattcacatcgggcagggcaattggcagcgacgctcagtagagctcgttgccgacgtcgacctcgttgaggttgcgttgcgggacacctagtcgcctccaggcaacagcggcgggactgttgctactgccaacgccgccgccgctgccgctctttgcctccgccacgcgctgagcgccaatgttgcggctccaggcgagcaggcaggcgtgtgcccgatggcgctcaacgaccatctcacgcatcttcagggtcgaacggtgaacgtagtgaccgagcggtccctcgccaccggggaaggcggccgaaccggcggcggtcgacgacgccgaggacgacgatctgcgccgaggcgacgggaaggccttgcggccgagcgtctgccggaccttgggcgactcccaccgccaaaggtaatgcttggtgcccgggtcaccggacgaagccgggcggagcgtcggtacggctgacgctgcgtcgtcggatgcaggggtggacaaatcggcagcggacggcaccgagggcgccaccagtcccgcagcggtcgtcactccctcgagcagcttagtcgggactacaggcgtgactgccgcacggggagggccagcggactctacctgcgggaccgacgacggccctgacgaggagccaggtgcgaatgaccgcggaggttcgcgagcgggctggaggttgcacgagaaggctgagtcagcagacgaatcaagcaaggcccgtctaggacggctggaggggtccaaacgcacctctggcttgacttggggaggcgcgacgttggatgccggcggtgtagccatatgcggaggcagagaccgggtgggtgacgagactgccagcggtgcgggtggggcggtcgcgagcgtcggaggtggtggcagcggcgcggccaaggatctcgcagagagcaagccctcctcttggtcgggtgagcgagtcgcgtctttgccgtcctcgtcgtcgaccaggtcgaaggcagaggccgccgagtctgggtggctggccaggcggtccttccagctgcgcggcgtggttttgctggctggaggggcgactgtattcgtctcggaggcccaagcctcggtctcgaagtccagaaggtcgctctccgggctcaaacgctccttccagctgctgaacgcttctcggcctgcaggacggaaggcgtccgtctcgctgcggtcccgggcgacatggtgcttgccaaagatgaggtcctcgaacgacagcccgcgcgcgttagagttggtccaaaagagatccgactcgacgtcggtctcgatgaggtcttccaccagttggagctgcgacgtacgcaagccgtcgaagccatagagcttgtcgtggatctcgggcgtcggcgtgaaacgatacggcggtctgaggaggggagcaagcatcttcgcccggcgctcgagcgagagcgaagcgtagccgtgattgtcgagcgagtgcgggatgaggctgaagcgttcgacgtcgtacgcgtcgagctcatcgtcctcaccgtcgaggaatcggttgcgggccgatatgtgctgagggccgaccgacctctcgtaggtgccgactgaggtgccctcggccggcgggaggaggacgtcgatgagctcctcggatcggtgctcgctcgcgaggacggagagcggaggctgttccgcttcgacgacgagcgagaggaagccgtcggtcgcttccttgagctgctcgaggggcgagggcgtagccttcgcgacgcgtttggggtagtgcgcgttgtgaatcgtcatccttgcctgctggaaagtggccagagcgatctgcgaggcgtcgtaaagcatgcgagctagaggtggttcgagcccggtggccgcgatccacagggccatctgcacggcccgacgcgcgtccaggacgcgctgaagcgatccgagtctcaggtcggatggattttccatcgtgtcgaccagcacgccgtcgaccagatgaaggccagggcgaaaggcgctggtcgtggtcggcggtggtggagcgacgggcgactcagcggcggcagcctcttgtgaggcgcgttgcgccttcgggcgctcggctgctgctttcttgagcggcctcttggcgccggggatcggtccgtggtccactgtccgcgcggcgacaagatcatagtcggcgagaccgctctgaaagagcgcggccgcggccgatcgatatcgcttgaggagggcggtgtacttggcgtccttagcctcttgcgttggcagacggctaagcttctgccacgcctggcgaaagatcttggtccgctcgtccaatgagaggctcggataggctgacatgaccgccgcacgcagctcttcgcactgtttgatggtgaggcggagagccgcatcgggatttggcgaccgaacttgaacgagcaggacttcgaaggccacaagcctgcggcagatgtcgggcagctggttgagccgatcgatctcaaccgacgccgccagtcgcacgtcggcctcgttcagatctggccttgccagcttcatctgcgtctcaagcttcttgcgttgagtattggagattaggtaccctctcaaagcgagtgccgtcgggagagtcgcgtcggctgctgagcctgcgtcgaaagatgatcgcccagccacgtcagtgattgtcaggacgttgcgaagcggcggacggcacttaccggccaggcgcgggggagggacgccaagcgacgtcttgctgctcgagaccgacgagttgacctcgcgcgtcgtcgagctcccgagagcgtcaggcgttgggccgagcgagaatggcggcgtccgcggctcgacgtcgaccgacgcatcgagggctggtagaccggggacatcgggacctgccgttggaacaacggcgccaacagacgaaggcgcggccggaggagctggagcttgcctcgaactgcgcggtcggagggcgacaaagccgagcgtcgagaggtcggcctcctccttgacctcgacctccgtcttctccaccggcgctgctgcgtgctcgcggggcacgaggcgcacaccaggcggtatcggaggcaaacgaggctttgtggcggagaggcgttgcttgggaagggcctcagaggctgcttcccttgcttcgggcatcggcggccggctgggcttccgcactggttgatgaaacgcttccagatgcgcggccggagtagactctggcgcgcgaccgacgagcgcctgctgaagcactcggcgctgctcaggagtggcagagggaccggccgagggaggttcctcaagccgcgggattggcacctctggagatgcaagatcggccgctggtgctgctttggcgaggagcgaggaaggctccagaggggcagcgggggcggcagggggtggaggcattgcgggcgggttgggcgcgatagcccgctcagccggcgacgccggtcgaacgagtgccgggggggcagattccggaaccggagaggccgtcggcggccgggacaaggccttgcgttgatactgcttgacgaaggccgtctcctggctcgccgggcgattgacacgctcgtcgcgttcgcgatggagctggcccaaaagggcgtagagcgccttcgcccttgcgcccttcgccggcagcgcagagatcgccgcaacgtgcgcgagcagcgcctgttgaagctcagtcggattgaggtgcggcatggccaatcgaagccttttttcgagccatttgcgttcagcgggctccaggcgggcaaattccttctgcggcttaggcgatggaggcttagtagccccgtctagaggacggactccgagaggtctaggaacaaccagacgtgtcggccgctgtagtgtcgaggggtcggtcgacggaagagcgagaggcgcgccgggctgagcctccacggcggagactgcgttccgcttccgcttccgctttgagtcggcgctcggcctcgagggctcttgacgtgacttgaaggcttgccggttgaaggcagcgccagctgcagggtaggcgagcgcttcgtcgggcgatgaggtgctggtgtccggagcggcaggggtggcagaggtggtggagccgtcgccagcggtggtggtggccgccgccgacgctcgatcggcctcagcccaatgactgtcagcagatgaactcgtcggtggcgagtctgccggcgtcgacgagcgaggatcagggcggcggttgtcctcggtggccgaggcgaaggaccgcacggcgccgatgggcgctgctgctgctggaggggacaggcgagtcgtcagtctcgtgaacgacgacacgtaaaccatcgccgtcacatcggtcaagctcagatgggaagtctgaatccacgagccccttcgggtgctctcgccgatagacgaagatcgcacgatctctgagggctgagcacgggccagagcgacgaccgatgcgcagatcggagcgaggagggcgcaggcgacggcgtgccggcaggggacgaacctcggtagcctcctaggccagcgtagaacttaggtgccctggcctgacgggccgcttgacgggcgagctgcttagtcgccgccttggaagacgggccgagcatcgagggttagaggatgagagggagggttgcggattgagtagcaaggaagagcgaaccaggaggaggccgactactgctcgtcgccgctgccgggcaaaaagggccctggcgaccgaggttcccacgcgggacgaggcgacgcgcttgacgcgtcgtgtgtgccccccgtcctccttcccttccgacccccgtcattgccttccttcgcgacaagccagctcgccatggccgcctcgcgtcgctcgtctacgtacggcttgccctcatcggccggccagtccccatccataccagcgtccgacgccgaccgactgctcgcaaaggagcgcgagtgcgatcaggtgcgttcacgtccctccttgcttttagacctcctctcggcgtctcagccagccagctcgcggtagcgctcagggctgcgagcccttgattgcctcgttccatcaacgctgaccttgacttcgatttccgcttttcgtttcaaaccgcccgacagctgactgaccagctcgagagtctccagaggcagctcgccggccggccgcccaaggctgagctcgacagcctccgatccgagttccggtaagccagcactctcttgtctgcatgcagcatcgaagcgggtcgcacgacctcttccaccgagtaaggcggccagatctgatctccattgcctcttcccctgcatcgccttcttacccgtctgccgcctgccgtccttgcccctctgcccggacgaccttccgcgccccagcatccaagaaggcctcctctccggctttcaacgggagaacgagaaggccgagcgcgaggttggccggcttcggtcgtacgcgcgcgtccttgagacggagctcgcgaggctccaagggccgacttgggcggtgcgtcgagctcttggtcgctagcgcgcaggtcgcgagccctgttgatcgcggcccgggctgacgagatgcgccaccttgcttctctgcttcccctcgaccctgatctgcatcgaatgtgtcggatcgcaggcaacgctcgacctccgtccgttccctttcgccctgatcaaggccgctcgcgacctctgctgacaccgtcactctctcctgtcgctccgtcgacccacagcgtccctgtcctcaaccgcatcaagcttcggctcgccctcgacgtcgctcgcaggatccgcgcccggccagtcgtcgccctcgacctcgcgccagcacacggtcaaggacgccgcctcccatcagcgaagcaggctcgggcaggagaccttcatcggccgcggcggcgcctcggcgggatcggacgctggaggatcggcgcacggcgtggacgaccggtcgaacgagtctgccgacgacgactctgggaacgaggaggagcagacgagctcgggcgatgaggtcgaggtacggctccttcggcgggcgatgtcgtcctcttcagggcttcgagcctgaacgctgacccttccctctctccttcccggcaccgcagggcgcgatcttctcacctgtcaagaaagcgcgcccgagacctaaagcgcaccttgcgccccgcccgtcgtcaacgagttccccgctcagccgccgttcaaacccgttcggccccgcgccgccagccggcctaccttcgacgcccgatgcggcgtcgtcgtccgcgataacgctaccggcagcgctgacgcccgcactcgtggccgaggagggcaaggctgtccggcggctgttgcttggcatggaaggccggctgagcacgcgcgaggccgaactgacggcgctcgttgagaaggtgcgtctgttctcctcccgctgtatgccgtcgtcctgattcaagccgctcgtttctatccacccccctgttcgtgcaggccgagcttcaggcggcgacctggcgccagcaccagcagcagctcagccgaccatcctccgcggtcgctacctgagccctcaaggatctcacactagagaccccggtcgatcgaaaccctccgacgccttattcatcgctctctcaaatcaccgacggctttgcgtcggccggcgctctggccctcgccgtcctcgagagagcgctctgtctagcgaacggcccgtacttgacgagggcacaccttttgttgctgccaccgaccgggctgcaaaagaacgtcaaccgagcagtcgaaccgacaagcaccttccagccggttgactttcgcccactgtcgtcggccgactggacccgcccgccctagccgtctggtccgtccactgcacgcgaacctttgcacgcccctcctctatcgcgcatgtcctttgagcacccacccgctctgccgccgtctctggaattgatcgtgtacaacatgagaagatggaacaagcgggccactcccccccccgccccgctcctcctccgtttacagcggggagcaaggcgagctgcgcgtgatcttggcgagaggcaagggggggtctgcgtgtgtgtatgtgtgtgttgagtcgacgccatcgctctgctgggccggcatgggacgtgcggctgagtgggaggaggcggagggagattgggtgaaggcaagaggcagaaggcgcggcgggaggccccatgttgcgagcgagcaaagagggcgcgccagggatgatgagacagcgggccgacaggggcctttgggagactgggccggaggcaagtgcgtgggcgtgctcggtttgagcgaggtgttcgcctggccgacgccttttgtgaattggatggggctcgcccgcccgtgcgcaagcacgcgggccgtcgtccgtcatcccggaaggtgaagagggtccgtgcggaagtcggggcgcgccaacgcttcaaggagatggacctggcccagcggcgcccgaccaacctgtgactaggagcgcacgcgcgcgcccgcacccgctcacggcgactcgcgcatctccatttcccggatcggcccgtccccgctggcgccggcactcgcgactcggctcttcttcccgcgctcgccagccgtcccacccacggctgacagctcgccgtcgccgctgctgccgtcgtcggcgccgtcgttctcagcagcggcggcggcggcagctcctccgtcgccgacctcaccgccgccgccgtcgctgcgactgctcccagcagcctgcgccgcctcccatttcctcacgcgcgccgccgacgccctcacgctccttccctccccgccctcctcctcttcctcagtgtccatcggctccgccccgcctccgtcgccgccgccgccgccgccgctggcgctggcgaaaggctcggtcgtcgcctcgctgctgctggcggacgacctctggaggtgcgagaagacgctgctgctctcgagcgtcggggtcgaggtgcctgacgtcggcggcgtcgtcgtctctgtcgtcgtcgaggagcgcgagaggccgaatgcagtcgccgatggcggaggaggaggcggcatcgggaagatctcggtggaggcggaggctgggccggccgagatgagctgctggggctgctggggctgaccggaggaggagatggcctggtcgcggtgctggtgggcggctgcgcgctgaaggccgaggatccctccccagcccgcaacgaccttccctccaccgccaggagttggaggagggagcgccgcatacgcagcgtggatcgtcaggttgagttcgagctgctcggctttggtcccgacgagatggcccgcatcgatgtcttcgaggtcggccatcgacggcggcggagcgctcgaggctgacggggagaacatggcggcaagcgtttcgcggaccgaggcctggtcgacgagcgccaccgtccgatcccagaccgtccggccgtcgccgcccttcggcgcgaaggccgcgcaccaccagctggcgaggttcgagagctgagagtgctccgatggcgtaagtgacggaaagcacgctgggaggcagaggagctcgaccggcgtctggcgcgagccgaccgaattggggtagacggtcagtggccggaggagcgcgacgagcgcttggagctcgggaagaggcgagtggcgcgcgagggggattgtctagcggtcaagcgagcgagtggtcagtgagagcgaaacgcatgcaaggagggatggacgcacgagcgaaattggccactcgccgtcgccccgattggccttggcaagccgccgccgaacctcctgctcgtagaggtcccattcgacgagccgcatctcggctggattgatcgcaacgacgatggcctcgtcgtcgtcgccgtcgtcgaccgacatggagccgccgaagcgcgcacgagagcccgaggcggactgacgccaggttgcctcgcaccgcctgcgcgagtcgcatgcgtgcagcttggcaggagcagaccgatcagccgccgtcgtcgtcgtcgtcatcaggatcggcagcaggtcgtcgccgtcttccgcctcgtcctcgctttggccgtgttggccgccgttgccgccatcgagctggacgaaccccgacttgccgcccacgatccgcccgcgcatcccctccagttcgccccagaccaccgcgcccagcttttcatacacccctcgcttgtaccggtcaacatgtagcctctcgtcgggccactggccgagcagcgcaaggaggagcggctcgtagccccacgtccagcagttgacgaagatgcgtgcggtcggagggtagagcgcgaggagggagagcattgaagcgatcgcgtccgccttgttgggcatgtcgcctgtgccgagcctggaagatataacgagcgcgaggggtcagcgacaattactactggagcgagtgctgcctctcggtaaccaggggagacgcacatgttggccgagtcgatgtagacagccctgagccgctcgcccccttcctcgtccggcagcaagtacctcccgagccggctctctccctcaagcgcccgccgctcgagctttgtccggaacgcccggtcagcacggacgtcgcctgtgtgcaggatggtgccgcgcgcgccctcgatcaggaacatcgtcgaacccggacagtggttcgcgtcgaggagcgtcagaacaatctcctcattctcgacccgcgcgccctttgctccacttctgccgccgccgccggtgatgcgcgacggagggccaggacgagggagaacgaagcgcgtcggcgtgtcgaacgcgagcgcgaggaggacgtccttccccgtctgggccgactggaggtgcgcgtacgtccgcttcttccgccggagctcgcccgataagcgcttgcgctgggcggcgccagattcgagcgagaggacgagggcttttgtctgagtgcgcgggaggtagagagggagatggaggggtcagcatgcggaggggagtgcgtgtgcgcagcgctctgacccgtcgccgtggtcgagcttaggacaaggcagctacaggagtgagacgcacctcggctgagcagacgattcggatgccgccctcgaccgacgcgaggccggcaaggtggtcctacgaggttcgggagaagcacgatgcgagagcgtcaggtggagcgggcggcttgcgagcagcctagcgggcgcagcacgcgcggagagagaggcgcgagagagggacggacgctatgcgcatgcgtcaggaggtagaggctcgccggcggaaatacatcaagctcgagcggcctggcctccttactgctcaggccttccccgagcttgcttgaggcgggcggcagcgggaggaccgccggcggagggtagggcgcgggccgacgcggcgtcgtgaagcagtcgatccggagttgggggtactcgacgacgtggccgtggaagaggccggccatcgctcgctcgctggctggagagaagcccctcgcgctcgacgtccaggcagtcaggcaggtacacgggccaagtcttgccgactgagaggaggtcgagcggccacaaggcagcagggcagccataaccctaagcggcttaccctaggtcgactcccgggcgcccagaggcccagagagtcgcgtctccgacctcgttcctctaccagccatcggtttctctccatcgccctgcctcccctctagaagcctcgtcccgatgccgggcacctactcatcaaatacaccaggtccgtcccttcttgaagctgccgaggtcgagcgacgggtcgtccggcatcgcgcgcgcgacccgacgcgctccctccctctcccctgccttagtcccgaccagcccgctcacccaactgctctttccaggcccccgccaacccttcctccctggcccacgcctcaatcgtaaccttcatctcgccgccggagtcccatcgctcgaccgggccattgcctcgggcacagcattcgagcggcccctccccggctcaaccgccgccagcagcctcgtcggccaggcgccgccgacccagagtcagagccagctgcagcagccgggctcacgcgggccggcaggcgcaacgccggctacgaatgccgctgaaagaattgaacggcgccccttcgaaataaagaagaatgcgctgcgctttcgcgtacgtccccccttccgtcccgctccggtcggctggttccggcggcgaaggacgcgtcgcggcgcgcacgcgtcccttccgcctgggttcaatctggatcgacttttccatcaaggctcagtcttcccgtcgggactgacagctgacgctcttctcctcttgaccacctgcttgcctccgctcgaacctggccaacccttctcgtctggttcctcagaagatcaaccagccgacggctccgcgcagcacaccagcgccgaccgcgcctgacatcaacgcctatccgatcgccgtcggcgagcctccagaggccgagtacgacaggtccggctcaacctcgacgcccaccgctgcgaattcgcggttcgtcaagacgttccggccgatcagctcgtcctcctctggcgcaccggcgcccgcaggagggatcgacatgtactcaaccgtctcgccgaccgtctttacgccgcacgaccaggacacattcctgcctgaaggaggacggatcgtcgtccctgtcgcgctgacgttcccgaccgctcgccaaggccggccgcggtcgacgagcgagcgggcggcactggtggagcgggtcaagcgagggttggaagagtcgtcggatgggggcgaggagagtgggagtggagggtcggaccggagagccggggcgagcgaggacgacgacgagggtggggcgacgggcagcggaggaggagcgagcgggtcctgtactggcacagcagcggccaacgccactccgctgacgggctcggcaaacagccgtaagaagaagcgccgcaagcagcgcgatgccgagcgcattgccgccctcgtcgcattcaccaccaccaccaccaacgcgcccgcggccgagccagagctcgacgagttggagcggcggaggcggtcggcaaacgactttatgctcagcttcccggtcgtcggtcggccggcgccggtgactgtgtcggcttcgacaccggctgcgacgacgcttactgccgctgctgctgctgccgactcggacgacgacgagattgtcgaggtcgacagcacgatcatgatcaggtgcgccgagcgtagccccctcctattcaaagggctcctttgcaaagggcggccgagctgactggaacttttgactggcgaacgcgcttgttcccgcagcaaaggaccgatggtcaagattgaggatacgctcaagagcatccagcgagcgtgcgtcctcgtgctcgcctcatgccttgctggcctagttgctgactattgctccttgcgaccggcgcttccagcatcaatggtctcccggccctccctccaggcgccgttgagccgccgtcgacgcccgcccagccatcgagcgggacgacggccgtccctcccaactctggcttgctctcggccgccttgggcaccgtctcggccccgaactcactcgtgacgaccggctcgacaactgagagctcgtcgctccgcgtccctgccgccggcgccgcctgcggtggtggcgcgtccggttcgcgtcgggcgctcaaggccagtgcgagcgggacatcgacgacctctggcgcctctgggacagcctcgtccatcattgcctcgccaaagcatgtcaagcagattgttgaggtcgagctgaccgacgacgacgaggacgacaagatggacaggacgggctgcgcgggtgctgctgctgctgccgctggaggttctggagaggacgagtcggacgccgactctgtgctcgagatggacccaatcaccatctcgtcgtcgtcggacgagcagtcggacaacgagatggacgtctctggcgagtcggacggcgggagctcggcccgcgccggcaaaagccggcgtaagcagcgggccacgtcaaagccgccatctgcgaccacggctgcggcagcggccaagcgcaagccgctcgagtgctaccagggcaaggtcgaggttgtccagtccggccaggagctcggcgtcggctcggcaaagatcatggacctcggcgcgggcgagtacgagcttcgactgagcttcaagctggccacaggctcgggctcgggcggccaacctcgggccgacatcgtctcgtccaaggcgcaactcaagggcgctcggttcgacgaagacaagcggacgatgacctggcagcgtgcgtttcaaccgtgtctcgtcctccgtgcacgcttctttctatagctgacccgtcaaagctttgcccttagtcaacggctccaagtgcgcggtccgcttcctcgagacgtcgtcctggatccagtttaaccagggctttggcgtcacacttaagtcggcgacgatgccctcgcctggccggtcgccgaccgcacgcatgacggtcggcggcggtccgccagcctcgccctcgtctgccgctccggcgagcaaacggccgacagctgcgcccggcaagcaagcagcgtcgaacctcttcatcgctccgcaaaagcgggcgccggtcggctcgcagtcgacctctggccaggctcaggcccgcaaggtgccgccggcgttcgtcgcctcgggccgggcgacgatcgcgaccgacacgccggcattcgagtcgcgcaagatcaagccgcctgcgcggtacgaggtcgacgatcacatctccgaggtcgacatgagcgtccggccgaaaaagcaggtcaagacgaagccggccgtcgtcgttgcgcccctttcggccctgacggcatcgaccgcggccaagaaggcggccgagcggacgcggctcgaggaaatcgcaaacagcgcggtcaacacggccaaggagccgacggcgatccgaagcagggcgagccagccgacaaccgagtttaccgtcgatatactccagtgcaacattggcacgggaaagattccccagtcggccatcggcgacctgcccaagcaggtctgcgtcgcgatccgggcagagatggtgcgtctgcgggtcgcgaaccttacgctcacgcacgttgctttcgctgacacccgtccctcttcgtagtcgcccgacgagaagtactctgacgggaagacaacatgcctcaaggagtcggtctactttcccgaggtcacgtttgactcgtcgggcaagaagatcatgacgtttgacccgccgctccagttccacatgccggcgcccttgttccgggcgctgcccacgacctggcccttccgcgccgaccgcggctatcgccgaggccatttcgtccggcttaagatcgagttccttgcctttatcgacaaggaccgccggccgtcgcagtgggttctcgacgagtttggcgactacaatcaggacgacgagctcgtcgacttccagtgcccctacgcccaggtgcccctgatccgcccccatcggtcgggcgcgatggaccgccaggtgtcgacctcgaaccgggcccagctctcgattgccggcatggagctcagccccgagttcagcttttcgttcaagtttcaggcctactgggacgccgccgccgtcgccaacgcgcccgagacggtgcctgtcccgaagcagcgcaaggttcggccgccgccgattgttcaggcaacacccactggcgagcggccgacgctggccattcagccggcgacggccgaggccaaacagcgcaagggcaagggccggttcgtgctcgacgacgacgagaagtcggacgaggaggagtcgtgcgccgatgcccttagcgggcttaacattgcctcgaatggcgcgagcgccgacgcctcggtacgtccttccgtgcttcctggcgccttctgatgctgcccgaggctgacctcacaccacatttgccctcgtaggacgagtcgcgcgtccagacgccggtcgagcgcagcatctcgccgtttgccgacaatgacgacgacgagtacgaccacgacaacggccgcgccaagcaggccttcacgatggtctttgagccgaaggggccgacattccggcccccgtccgagcggtcggtccccaagggcagccagcgcatccagcctggcacactcgcccatgaccttgcgagcctcgaccgcgatgctgtcgacaacgagatcatcgagcgcgaggagctcatctttgatatcgagggcgtaagtcgccctctgctatttcgtctcgccagacgcttgcgctgatagcctctgtcgcctgcagatccacgacggccagaagtttgtcatggccctctggaaccgctggtgctcgcatgtcgactcgacggtgcgattctcggcgcctcaacgtcttgactctgcccaagctgacgctcaccttgttctccccttccagctcggccgcatccaccaattcaactcgggcgctcacgtccttggcttcgtcaaccgttacttcatcgcgatgtttcagaagaacgtccggcgctactttgtcatccacctccaggtacgtcactgatcctgcctccatgcagccgccttgacgctgactcgatgtgccgtcgacgccctaggtcctcgccgcattcgacctctgccagaacgacacgtttgcgctcgcgctcgctcagtacagtaagctgacgcagcaagtcctcaagcagagcggcgcgctcaaggggccaactgcctgaggcccctcgtctcctgccttcttctgttcacctcccctctgcattctttcctctcgcacgcctcctcccatccttgtattcgagcctgtctcacgtccgtcctcctcgaggccgtcttcaccttacccacctgcgccaatttcgtgcgcgaaccggacccctgccccgccctgcttacgatgcccttctgcagaagaacagccggacacaaatctctctcggacggggacggcgtggtcgtcctcccaaccgcaagcagagcagagcatcactggttggctgaatgcgtgggcggccgcgagcgccgggctggcttcttctcccaccttcccaacacaaccaagaagatgaacacaatctcgatacgaagggaggcatgtgatcagagaagaggagggcgggtcgagaggcctaagcatagagcgagtcctcctcctcatcctgctggaaagcagcattgccgccagcgtcggcgccgtcggccgccccgccgtcgatgccgccctccgggaacttgaacgacgagccgaacgaccggctctgctggagcgtctgggcaaacatctcgtagcgccggatgtcggcgtccgagacagaccgccgggcgtagcgcatggcctcctcaaagtgggcgcgcgtaatctccggaaccgggtcctcctcctcctcctcctcctcggcggccggcgcgtcgtccatcgcggcgtcggcgccgtcctcggtcttgacggcagcggcagaagcagcggcgtcgcgctcggcctttgcccggtcgcgcttcatgtcggcctcaatcgactcgcggatcgcgagcttggacgcccgctggcagatctcggtcaggtcggcacccgagaagccgtgggttgccttggcaaggaacgtcaggtcgacgtcgggcgcgaccggcgacttcttgagcgtcgccgaaagaattgagatgcgcgagtcctcgtccggcagcggaatgtagatgagctggtcgagacgtcccggccggaggagcgcagggtcaatctggtcgggccggttggtggcaccgatgatgaagacgttcttcttggcgccgacaccgtccatctcggtctaaaacgggagggaaagaaagttcgtcagcgaccggacgcaagagacacgcaataaggggataataacaaggacgcacgaggatctggttgaggacacggtcgccggcaccgccagcgtctccgccgcctccgccgccacgagcctttgcgatcgagtcgagctcgtcaaagaacatgacacagggcgcggcggcgcgtgccttgtcaaagacgtcgcggacgttggcctcggactctccgaaccacatcgtcaggagctcggggccctgcgaagcaagaaagaggggggagggtcagcttcggagtagcgtaacgccgcaaggcagatcggcgaggcaaggacgcaccttgatcgagatgaagttggcctggcactcgttggcgatggccttggcgagcatcgtctttcccgtgccgggcgggccgtagaagagaacacccttgctcgggctcatgccgtacttgaggaacttctcggggtgctcgaccgggtactggaccgtctcctggagctcgagcttgaccttctcgaggccaccaatgtcggcccacttcacgttgggcacctcgacgactgtctcgcgcagggccgacgggttcgagacgccgagcgcgaaacggaagttctccattgtgacgccgagcgagtcgagcacctcggcgtcgatcgtgtcctcatcgaggtcaatcaggtccatcttctcacggatctgctgcatggccgcctcggagcaaagcgaggccatgtcggcaccaacgtaaccgtgcgtgtcggcggcaatctacgagaaaaggacgctggtcagcgatcaggcgagtgtgcaacgtcagcgagcgacagggacgcacctgctcgagatcaacgtcgtcgccgagcttcatgttcttggtatgaatccggagaatctcgagccgaccggtggggtccgggattccgatgtcgacctcgcggtcgaagcggccgaagcgccggagggctgggtcgatcgagttgggccggttggtggccgccatgacaacgacgtttgaccgagccttgaggccgtccatcagcgtcagcagctgcgagacgacacggcgctcgacctctccgttggtctgtcgcaggcataggtgtagggcgcgtcagcgggaatcgctcgggcgacatgtctcgagccaggacgcaccttgtcgcgcttgggcgcgatcgagtcaatctcgtcgatgaagatgatcgccggcgagttcttctcggcctcctcaaacgctttgcgcaggttcgactcggactcgcccgccatcttggacatgatttcagggccgttgatcaggaagaagaaggctcccgtctcgttggcgacagcccgggccatgagcgtctttccggttcctggcgggccgaacatgaggattcctcgcggaggcttgatgccgatcgacttgaacagctgcgggtgccgaagcggcagctcgacgagctcacgaatctgggccatctgaaggagaggacagcgcaaagcgtgggggaggggagggtcagaagattgcgcgaggagggctagggccagagagcgacacgacgaacctgcttgcggcagccaccaatgtcatcgtagccgacgtcggcgaggttgttctcctcgtcctcgcgcttgacgggctcgccctcggtgtggatgacggtgtcctgagcgacaatgcagtgctcggccgggtccgtctcgatcactttgaactcgaccgtgcgcatgccgccgcggacgaggaaggtgtcgcccttgcgaacgggccggtaggctgggagaaaagtggccaggtcagtgtcgtcggccgagaagaagacggcagaccaaggagacggaccctcgaggaagtagggcttgaggtagacctcaaacaagttgccggtcaggccctcgacggagtcgtcaaagggaaggacgtggatccgcttgccgtacttgatgtcggcgcaggcgtggaccgagcagaggtcgccgagccggacgcgaatgttgttgcgggcgactgaaggagcggcatacgagtgtcagctagggcggcctctgctgcaatcaggaagaggcgacgcaccccggttcatctggatcttgccctcctcaacgtcatcagacgagagacagatgaggacggtgtccttgcgcttcttgcccctatgcgaggtgaaggccgacacaaaggcgcgagcaagagaggaaaaaggagaggacgaggaaggggagaagacgagcagaagggaaggagcgatcgcatgcgtcagcgctctcgctctttctcgtgcgcgcgctcaggctcgatctccgcgctggtggcgctcctgtcgccggtcgcagagctgctgctcaaggcggcgagctcgaagcaacctgacgatggctcgtagtagtaggagagcagacagaggggagaaggacgacgtacttgacgaggacggtgtcgccccggaagaagccgagaagctccatcgtcgccgggttgagcgtgcagaccgagttgtcatcacccgtcgactcctggacgatcagacggttgggactggcagggtgcgcaaaggagcgtaaaacaagtcagcgtgagctcagcagaatctgctggcaaggccggagcaggccggtagaagcaggacagagcggacagacctcttcttgggtcgaaggatcgacgtggcgaggtcgtctgggttgtcgacctttgcggcgcctcctgcggggtcggccatggctgtgagaggtgaaggggaagggaggagtctgataggggatacagtcgtgaggagcgaagggtgtgggccggtgaggggtgaagggtgatgggatgccggtggtggcgaaggagagaaggaggaggagcgatgggctggctggtgcgcgcgcagagatggcttctgccgcgctggaggcagcgcgagggtgcgaggcccgtaactcgcatgccggctgttacgtctaacctctgacgatgaccagcggcagacctcgtcgacgctactcgagcgtcactcgctcccctctctcgcccgccaccctatatctcggcctggccccttcgtggatccggccggctcttacgcttacctaacgacctgcccacttgctgatggtcgtcaccaggaggcccaagcctgctcgctcaccctcactgacctgcgccgccgatctcctcagtcgcacgttggccatgacaccttaacatctccttctgctgactgggttggtcgcttcctcgctgaagcgaaagaccgtgtcggagcgcttcgatggcagcagcgaaagcgataccaccaggagcagggtcgcattgagtagcgtgtctgacagtctccaagacggcagcgcagtcgaggcttgggggcgcatgcgacgacccaacctgacttgtgcacggcagtcggactaatcgagggtcgaagctatgctctcagtgaactcatccatcagcccgttccaggaggagaaggaggagcttccgtcatcggcggacgacctttgcgaatctgagcgatgacagccggccgactcctgccctccgcactcgcgcaccttttggcgctttatgcactgaatcgaacgacccttttctccatttcatgacctgccactcctcttctccggccgacgacaggcaggccaggctgcgcaggatgggtcgacaattgacgacggcccggtgacacgtcgagctccattctgctgggccgcctgcgcgccgaggccgactcgtccgcgctccctgcccttgaacgccgtctgccgcccaccttctccttggcagccgtccctccctcgctccgctgtctcgtcccggcctccgatctcgctctcgcgcgtacccgaagcttctctcagaggaccaccctacatcgccgcctctctcgaaacaccgcgaggaccccaagacacgaccgcctcagcccaatccagcgctagctccctccgaagcctcctgctctcgccctccgtccagccctcctcatcggaccacccaatctcgcttcgagcagcccttactcatctcctgcccgctcggatggtccgtccgccgccgtcgccgccatcgtcggccgtggtccgccggaagccgtacatcggctcgctcgcgctcgtcgccgcgaccgtcggcctcctcgcaccagcgccggtcgaggcctttaccttccagttcaaccagactaacccgaagacgtgcgagccggtcgaggtccgctggtcgggcggctcgcccccgttcaagatgtttatcatcgtgcgtcgtttccgtctccccttggtgtcaccggcgctggctcggtcgcgctgccccccccccctgtcgctcacggtgcggaccttagctgatcgcttacctctctcccgcgctctcgatccatgtcgcacccgcttagccggcgtacgactacccgtacacggtcgagatggacgagtcggcctgggacgaaaagtcgagctcgggcgtctatgtctggaacgccaactatcccgtccgtcccggctctggccgccgcctgccgatcgactgctacgaagctgacccctggcctgccctcgcctgactccctcgccatctgctcctcaggacacgattctcggctttgtcgccgtcatgtcggactcagctggcctcgcgaccggtggcgtctcgtcgatcctctacatggcgcccggcggcgacccgacggcgtgcgacatccgcaacgccgaggccgacttctactttgcgctcgacccgagggacggcaacgttcccacctgtagtcctcgtacgtctgcttggctcttgaggccctccacgacctgggcgtggctgacgcgtcttgcccgccgcagttggcatctcctggggcgagaatgcgaccgacccggtcgagatcatcggcgtcatcccgaacggcaacgctttcgtcctcccgaccaagccgaacgtcaacggccgcgactggaatgtcaatatcgccgcggggacgccatatatcctgacgatgctcgacagcggcaccatcggcaacggcggctcgtccgacttcctctactcgcgctcgagcaacagcaccgactgcatcgacgcggctgcgccctcgcggacgccaggctcgacatggggcacgcccgacggtgtcgccgcgacgacggcccagcccgagccgactggagggagcggcggcggcggcggcggaagcagcctttcggccggtgggatcgcaggcgccgtcattggtggcatcgtcggctttgccatcatacaagtcgcccttctttggtgcctctgccgttcgtcctgtcgtcactgcaacgaacgaagggacttttcggctaaccctttttctttaccctcaggcaaccgcttccggcggacgctcgcaaagtcgccggtcgaccttttcagcacaaaggccgaaggccaagaggttggcgcgcccgtcacatcgggtggccgccgacggggcctctttggcctccggaccgaccgcgacgtctcgcagtatcagcccgagccgtactataccaatccggccggtcagccgtcgaacgacgccctcgtcgctggcggccggcgggctggctcgggcgagtcggatccattcagggacagccgcggcgacggcagcgcctcgtacctctacccggccggcggcggctcgggcgccgactgggctcgccgaggctcgcactcggacgccggtgactcgctcggctcgcccgtctcgcccggcggcatcggcctgcgacccatgggtggcagctcgggccgctcgcagggatcgacgccgccgctttcggccacggcgacgccgacctcgcccgtcgtcggacacgccggctccttcctcgacacggattcggcctcgccgagctatgcgacaacgggggtgaacccgctgtcgtcgacgatgctaacgggcgtcagctcgaaccgacacatgccccggtcgagctcgatgctgtcgacgccgtcgacggtaatccccccttacaacccgacctcgacgacgccggccgtcgtccggtcgaccaagcagatgctcgcgctcgccaacccggacgacgacggcacgctccctgggccatccttcgtccgtcatcgggacgccgggccggtcgagcatccgctggcacggaggcgggagcccgagccggtcgagctcccgccgatgtacgacgagatcgagcaccggcaccggcagcagcaggaagacgaggaggttgcgcgcgtgcgggtcgtccagatggacgcgtacgaggacgagcacctcccgccgatagacacggtcgacaacgatacgcgctcgacggacgagccgcggtcaccagatgacagaggcgacgagagcccgatagccgtcagtgccgacgtgtccgaccgccggccggcgtgaccctctcggccgacctcgcctgtcccgtctgcctcccttcgcctgcctgcgtttcgcgtcttgttgctttctacctatgcccctgccctccttccaacacgctttttcatctaccacgaacattatttgcctctgtctcgacgcttgtcttgtctccctccctccatcacactctcgcctgcctcttcacccgggccaatctgtatctgcccttctcgctgcgtgtctgtcccctccgcttggtccctctcgcgaccatccgctgccgtctgcccatcctagatcccaagcgactgtcgctcgccatacactcacggaaagacccaagaggccatctatcgatcgcgagtttcacgaggagggctccatgctttctaccgctgcgagtctatgcgagcgcattcgtgagcgcccggaggcggcactggcttaggcctcggtcgtcctccctggcatcgggcaggatgggcgtcgagccctgtttggcggcgagaacactgctgagctcggctcggatgccgccgagctttgcgcgcaggtcggcgatctcggccgccggcgcgcatgccaaggcctcgcgaaggaggctggcaaggcggttcacgtcggcctcggcctcgcggaaggcgttctcgggctcggccgcaaacaggacgagctctgcgtcgcgtcccttgcctggagcgtgttgtgaaacgggtcacgtcagcgacggcaactgggactgagaggctcggcggacgagacgcacaagagcgtcctgcatcgagctcggccgcaagcgagtcccaaagggcggctcggtactcgggcagggaggcgcacgaccgctgagtgagttcgtcccactggtgcacagcctgctcgtatgcggtaccagccgatcgaccgcccagggtgcgcgcgacgagcaggccagcgctctccctgacctcggcatcgtcatcgacgaggagccggccgacgagcgaatggaagttgaggcggagcgctgacgacgcctcggcacaggcagcgagcgtcggcgagcagccggtcaaggccgccatgacggacagccgattctcgacagactgaaagccaagcgaggcagcggatctcatcagctcgtcctttggctgcgacagcgagaggggaagtgcacctgagtctcgtccgacagctgcatcagatgcgcgaagagagcctgaacgcgctccgcggtggcacactgcacgaggacacgaacggtcggtcagcgtgccgtcacacccagcctcgctttgtcctgtgcgcacctgaccgatggccttcccaaggaagatgaggagagcttgccgaagcggctggtttgtgctcttcgcaaactcggcgaggagacgatcccagcgcgacggcgggaccttagtaaagtcaaacggcgagtagcgctgagcccaggcgagcgcctcgagtctcgcccgtgagctcgaatcgggcgatgtggcgatgctggcgatcgtcatccgctcgccgagcgaggccgaaatgaaggagggctccgacagcgcgagctcgacggcttctgggtgaggcgaatcgagcagagttgccgtctcgtgccgggcgatgatgaagcgcgcggcggcaaggccgacggcatcctcgccgggagtaggcgctgcatcaaaggacgactgcacgcgctgagtgcagaagtctctcgtcgtcgcaaagacgtcgtccgggatctccgccgttttggtctctgcggcttgaatgacctggatgaagagagcctgcgtcgggccgcagcggttttgcaagagcatcggttcctgtgcctgccggaggtgctcgatgaggcccttgcccggcgcgtacgagaggctcttgaccgtctgctgcagaagaacaaggacctgtgcgagcttgccgtggagggcattctggctctccggtcgcgttgtgagaccggcggcgaggatgaaagagccgacagccgacgccggtaccaccgcaggcgtcgcagcagcagcagccaagcggatctgagggtgggttgtcaaacgagggccgcatcagtgggctgacgagctagtcacggcacgcgtgtgcgagcgattcgtacttacgtcgatctgcctgcaacgtgcaaagcgggcaaggtgagggaggaaggcatcctgaaaagtcgtctcggaaggtgaggccttcaggcagcgcaagaactggaggatgacaaaggcggcgccgggtgaggcgtcgagctgtgaaatcggacgtcagatcgagtctcggcgcaggccgcgaccagcctacggcgctcacctcttcttgcgtgatggcgtcgagagaagcgaggaagaggccgtgtaaggatggatatttggaaaaccacacgttcagcgcgtcctcgccgttcgcagccgcgctcttgctgagtcccttcttgacgagcgcgcccatcagttgcaggccaacgttgcgcacgccccagctaaaggttcccgaggccaagtcgggcgagtcagcctctcagaaagagtgcaagggtgacgagggtcaaagcgcaccttgaggaagacaaggagcgcatcgcgacggtgactgcctgctcgtagacccgcgccagctccgacgacatctttgagttgttgcacagcaccttgagcgtgttgatggaggcgatctgggtggtctcctcctgcttgtcacctgcaagctcgaacagggccgcaaaggcctcggagatgaggctcggctggccgagcacgacgccgaggatggcgtatggaaggccggccgagcgccggcccgaggtcttgtggaagccagagactgtcgtcaggtggacctaaagggtaccagcaggaagatcagcgtgattcatcgtacagaaagacagaggcacgcaccctgagccaatcggcaggcagcgacttgacttcgaatggtacggcggctgacgaggcaatggctgcgacaacctccgagtagtgggggaagatcgagaggaaggcgcctgggtggcggatctcggagaggaaggcaataaagagtcctccgatggcttgcaccgtctgggcaccggtcgaagcctgctgcaagagccgcgaggcgacgatcgacagcagggcgctgaggggacggcattgcggcgtcagctatggctaagagaaaaatccagcatgacgccgtcactgacctgctctcgcgcatggtgcgccaggcccacgacagcagcatctcccgctcgcgccgcccaccggcctccccctgggccgagacgatgttggatgcgcgagcctcttcgtgatcaacagagtcctcgtcggcaccttctcctgcgttgatactcgatagaattgggcgcgtgcactcccaagacaagttgatggcctcgagggcgtcctggaagagctggtcggttgctggtcccggcggcagaagggggaggatctgctggagagcggtgaagaggccgtgcacgggtttggtcgacgcggccaggatcacgtccttgagcgagagcttcagtcgcttcgatagctcctgtaggagaccagagaggaacgcgtctgaaaaggaaaaaatgcggagtcagtcagcaccataaccccgcttcaaaatgtgctgcaacgaactgccgtcctgctcgacatccagacgcttggtcttgaatgagcagatgagtcgaagaaggagcgcgcccgtcgtagactctgagcctcgagggttgctggcgtagacgagagcctccttctcaagtgctccgatcgagaccggctcgctcagaccgggtaagccagagactgcctgctcgagcctggaggaccgtgagagacagccggatcagctgccggccgagaccgcgtacagatagaagctctgacgcacaaggcgagagcgcaggtgcgaacgtccgtgaacgtgctcctgaggcaccggaggaccttgcggacgcgctgacgcccgacgtcgttgaccgcaaaaagggtcacccgtgtcggccagatgacgttctgagcggcggctttgccagagagcacggtctccgacgccttgagcccgggcaaactctggacatcggccgcgtaagtcgggaactctacgcaggcgctcgaggcgacgacgaggccgagcaggcggagcgagacaaagctgcgaggatacgagcctccgatgaggaggttggcgaaagaatgctcgatgatccactgtcggcaatcacagtaaaggatcagccacgccgctgcaggtcgaacagagagacaggcgcgacgtacgttgagcatgcgcgcggaccgctcgaggtatgcctcgagctcttcgattcgcgccaactcagcgtccttgcgacccgatgtcggacgggcgagctggccctgaagctggcggtgcgccgtgtgtgtcgagttcttgagtcggcggagcagatgcgacgtccgggcgatgatgttggatcgcgcactgcggcatggcgagatggacgacagcgtcagttttcgccaacaagagacgatgtgcacgtgcgagggacccactcgctatcccaaacgttcattgagcctcggaggaaggcctggactatctcccactcgccctcggatatcggcgcgccgacggccgaccgatccgtcaccagccggtagactccgagtcggacgacaggagaaggatgagcgaggatggattggagacggtcggacgagagtgggatgaggttcgagtcggaggttggcacagacgagccgatgtcggagcacagggagagagacgtccctagcgagacgagcgcaatccaagcttcctcggcgctggacgaatcaccgctcgccgactccagagggtggacgagatcgagcagggccttcggatgagcctcagcgaccggccgcacgacgaattggacgacgttgaaacgcgtcgctgggctgcaactcctgaggtgctgcgcgagcgccccgaccgctgtgcaccactgccagagcccgttcgaagcggctcggtcggcgtaaaactttgacagaacaacgccgagcagggcgccgcggaacgagatgttgtcggccgacgacatgccttcgaggagcgtcgagggcagatctggcgcccactgcgcgagccgttcggccgagaagagtggcacgagcagcgcgaggatctggtagacgcccttgttcggccggaaggcctccgagaggagggtcctacatgctggtgcgagcactggatccgagtcggcccccgatagcatcaaaccgactgtcgccgcgagtgcgacgtacgcctgcagagcctcccaggccgcccgggagacctccttgctgctctcgttgagtgcgagcgtcaccatgttgacgacaagtagctgctggtcggacgacagcacccaggacaccgcctgagggagcaggtcgcccgaagggctgctggaccgcgtcaggctggcaaggcgcttgaacagggcagcctggaggccgtactggcctggctcgagtgcggcgtgcggccggtcggcctgcgcccttgtagcctggccaaagacgtcggccacgatgaccctgaagcgagagcagctcgtccgtcagtctcttgtctgcgagcagtgcagcccctcgagcgactcacctgccatcctgctcggcgttctggtcgagaaggtcgagctcgcctttgccgacggcgaccgccagcttcttgagcgggttgatctctgctcgcctgggtggcattcttgaacccgacagaaatactctcgcttctggacgtgctcgctgctgctgcctttgaaagctcctttgaggcaaaggaatgggctggctggtcgatgttgacggcctccgccgttcgaaagcggcaacggccggctcgtgcctcctcctcaagccgctagccgtcacctcctctccggacctttcgattacctttcccttgacaggcacgtcttgtacagctcctctcaagatggcctcgacctcttcctccccggcaacgactgagtctcggcaggagctcatcggctcggctgtcgcctttctcaaagacccgacggtgggtccttggcagagcgcctgcctcgcacgcgaccgcgagcggccaagctgaccgcttctccccctgaacgatgagcgggccccaggtgtcgaagtcgccgctcagtcagaagatcaccttccttgtcggcaagggcttgacggatgccgaagttcagcaggcgctggccatcgccgccggcgaggctgctcgaccggctacgacggcagccgacggtgcggccgcgcagacagtcccggcccagctgccatcgtggcagcagcagaaccagatctcaggaggctcctatgctccgtacagtgggacagcctacgcaccttcacagggcctgatgcggcctcgaacgccgccgaggcgagactggcgagactacttcgtcagttcagcctccctcgctgcggccgggctaccggtcgcggcttctcaccggcccggcccaggtgttgtatgctgacaccctgccgacatccattttttatcttcaggtcatggccgtcatctcgggtggcgtcatgtatgggctgtctgcgctcatcaaggtgagcggcctcctttgtctaggcatcggacgacgctgacacgccaggctcgccctccgtcagcgctacctcctcccgcatatcctgcctccaccggcgccgatcttcacccagacgtcgaccaacttggcaacgcagacgaccgagatccagacaaagctcgacgagctcatcacctcgacgaccgagctgcgcgactcgctcgcggccgagcgggagcgggtgcgagcgctgtgcgaggaggtggagcgtgtgcttgaaggcgtgcgcaagcgcgaggaagaggagcgcgagtggcgtgaagaggtctctggcgaggtcgaggggttgaaagagggcctgccaaaggtgagtcgcccaggtcgtgtcagcctgagaccaagtggcggcagcgactgaccgctcgtgccgtcaaccgcagatgcttgaggcacacacgaacctgctcaagacgtcgcttacgactctccagtcggaactcacctcgctcaagccgctcctcaacacgcacgcttcggtcgtcgcgtcgccgtcaccagctccgagcaccggcgccgacgtcaaggcgcgcttcccgtttgcggccggctcgaatagtgtggccccgcaaattccgagctggcagctcgcggcgatgaacgctggtgtgatgacgggcagtaaagatgagcccaaggtcgaggtcgaggcgaagaaggacacagtgtgacgcctgctcagctcgatgagatgctgcctgctagtcggtctgagcagaagttgggcggtgcaagagaagagcaatttagaaggtcgtggcggtcatcgagtgaggggagaagaggtacaacgcgaaatgaaaagtgcaggagaaatacagagtgcgaagcgccgaaacgagctgggcggcatgatcgacgcaagcggagccgctcagtcggggtagtagggcggaggtggcaggccgtcctcatcttcgccgccgtcgacccgcgcaaccgcgacgccgtcatacaggccttggaccggggcatggtccgctggatctgccattgagcggatcgagcggccagagggactatgtcgaacggcagttggctgcggccctggcgaggggaagagcggcgagcatgcgagtgatcgtcggtgacgccgatgattgtagaggtaggtgaagaggaaaatggccggtatgacgagcaggttgatgagggccgtcatcggaaggaatctgtcgaggcagcgaccggtctggtcagggcaggcagccaagcggagaataaggcagcgagctcactcttttggctcgtagctgcccatgagcttccggcccccgttccagagccgttccccaaagctggcgccgacgagctgaaattccttctgcaggaccgctcgctggtccgcccgcaactcctcgagcagcatggccaggtcgggcgagatctcggtcatcgcgtacgacgccggcggaaagggtcgaggggcgtgcttgcatgcgccctctgagagtaaggtatcgtcgcaggagcagggaagaaagctaaaggcagacgcctccgccgctggaagtgcgccgccggtttgcgagaggtgatccgatcgagttgaagacgcagagagcggtcccgaaggaggcaagccgctgagaagatggccagtaccaagctgtccagggcggatgctgctttaacaagcggcgtctcggtcgtcagtgaccgtcggtgaaggggtgacgagcgcaacaagcgagcgaccggtcggccgacgcacccttgcagcggcggcacgcgcaggtcgacctgcatgtctctgctattgaagctgcctccgatgcagcggaccgtcacctgaccatctgcacgaacgacgaggtcaaagtccttgttgccgtcgacgtcgacagtaacggggcctgagcgccgcaagcgaggtgggaagagccaggcgcagttacgtcgtcagcgcggggagctcggcaaagagcaactgtttagtcgcccggaagagcgtgaagaagcagcacgcaccgccctcgacgtcgcccttgatgacgagctgccagcgaatgtcttcgagcgagataacggccgtccggcgagctgaggccgccgagtcgaggagccggccggcgtcggcctcagctcgcgcagggtcccggatcgtcagcaccgtacgctcgcggcccttgtcaatccatcgggcaccgatgaaggcgggctggaagggcgcgatgttctggccccagtggtcgcggtagttctctgttcggacaaagggaaggctgggtcaacaagcgcgcgtcgtcaggccgacagggactcgagacccggtcataccgattcggaggtcgaagtcgcctgtgttcaagcccttgtcagctctgctctcgacccatccgatacgcgctgcgatgcgactgaccttcgttccagatcgtgttgagcgccaggaccatgagcggcgcaaaagggtgcaggggggggtcgacgcccaacaggatcaggcagcccggcggccggcttcgggctcgggccatcggcggagggcgcgcagcagggcgtgcggctattttatttcagtcatatattgtgagcattgattaatctttatcaatgctgtttacccaacggttaaatcgtcaatcaggaggttgcgggttcgagtcctgccctggtctaactggataacaccccctcaatggagggccgggtggctcaatggcggagcgtctgactacgattcatcttttgctctgctggcaaaccatttatttttgttcagctttgccgcagacgagactcgcaagctcaggcaatgcagagcagcgggcgcgcctcgaagagacgagggcgcaagcttaacgctgtctcgtgcagcgtctgccagcccgtggagcgccttgtgacccgcgacgagacctacgtccaccgcgaggggaccaactagggcgagagccgccacttcgagcacgaggagaaggccaccgcgcagacccctccttcactctctcttaattctttccccttgtcctctctctcgtgctgttcccagctagttactcccaataatcctatctcaacctaccgcaccccccaccgcacccccgcttgtacgatctcgacgctcgcatctcagtcaacagccgctcgactcgaaagccgccctccgtccctcttcgtccatgcgcaccatcaagatcccagcaggtcccactgctggccagagacgacgccgagctgaacagcctcacggccggacgacctcctccccagtggcgcaaggtcggccaggtcgatgacgcccgtcaccatcgacgcaaaggcatccctgctggcgagtcggcctccgcctgctcccgctgccggccgtagtgcgccgtcccggcagtcccacagccggacgacattgtcctccccggcggcgagcagcatcttcgcttgaggcaggtatcggaaggcgagcccagccgtgtgagagttgcggtgctcggagagacgcaggacaggccggcttgtcgccacggttgccgacacgctctcaggtgttgccgccggcaaggcgaacctgaggtcgtggatctcgagctgtcaagaggcacgcggtcagcgtcgaaggtcgacgagaggcgcatgggccaacgcaccgagccattcatgcccgcgacggcgatactccagccgccggtgctctggaggccaacgacggccgtcgcaacctgcagcgccggctgccggttaacttcaaaccagggcgtccgcatgtcgtactggccgacggcgcccgatcggaggccgctcaggacaatgttgccggccggatcaatctcgcggtcgacactgcagagcgcaaggaccgacgaccggggcttgatgttgattcggcgaaagttgttgaggagcggcgccttgccgaccatcatgtgcgacgagcagcctgacagtagtgcaagagtcagccaccgctggcctcagaacccaagcctgcacagcgcaccgaggacgatgccgccaccagggaggaggagcgacgacgtaacatcggtcgccttctctggccgactgatcgtgcatccgccgccctgcatgtcgatcggcgagtggatgagaaccggcgaaggcccgaacgacgtcgcgaggatattgccgtcctgagcactgatggcgctgatctgagggacgacagaggcggtcgtcagcaggcggcaggctttcggtgcgacaaggcagacggaagacgcaccgggccgcttgcggcgatcgagagcgtcgtctgccagccggcgtccctgtcggtcaggtcgaggacatgaagcgatccggtcgaatcgccagcaacgacgtgcgtcgtatcgccctggcgatcggaagagcagagacatcgagtcagcatgcgacggacctgcgggcgagaggaaaccgactcacggcgatagccgtgacaaacgcattcctcgctggcatgggcaggtagacagtctcgacgacacgtgctgctgccaaggcggcctgggccagaccactacggaagggaggacgactggtcgtcagcttgagagtgcggcggcaagggcagcagaggaggaactcacaccctgtccctcccagcgctgaggggaccagccaggctgcactgccaggcaacaagctggctcgcctgattaccggcaaagagcggcttccgctgcttcctactacaaccgctcgagtcgacgtcgcctggcttgagtcgcttgcttggtcggctcgtcgccgtgcctgctcgagagtgccgagcgccgcctggtccgagatcttcagcagcaggctctccagccggctgagagccctcacggaagtactttttgcggaccgggtcccagaccatgcccggcagcttgaagggcagcatggtcgaggcgtgcgctcggcgtcgaaggaggtcgtcgtcagcagggtcttgctgcgcctgacgagccgacacctcgttcagagacggaagcgacgctggcgtctcctcctgtctgaccgtcagctgccctccgcccaccccagtcactccagtcactacctagcaagcggtcccagacacgattccagcagattgtcctaggatggctgccgtcatgtcgttggcactcgcgacggcccacctgcccttcagctcggtcgcctcaacgagcgccctacctctgccgccgcagacgaccctgccctcctcctcctcctctgctcctcccgccgccagtccgacgacgggccagccatccatatcggctgccaagaaggcccacttctgcccgcactgccccaagtcgtactcaaaactgtcaaagctgacggcgcacgtcaagagcgtccacccacccaacggcgcagcgcaggcggccctgcccaagccgttcccttgcccgcatccgggctgcccagagtcgttcggccgcaaggatcatctcgacgtccattcgcgagtccatcggcctgagagcgaacggccatttgtctgtgcgaaggccggctgcggcaagcgcttctggaccggccagcacaagcgcaggcacgaggaggcgtgcggcgtctcgggcgggtcgcaccaggtccatcgagtctccctataaccaatcgggcgaggtcagagtttcagtccaggagactgacgctcgatccccttatccccttgtgcgcgaccgccgtccatccagtgcccctcgtgctccgagtcattcaagaaggactcgcagctgcgcgctcacgtcgcgctcgcgcacgcaccgccagggacgaagcccttcccttgcgaggtggcggcctgcgtaaagtcgtttgcgacagctcagaagttgcggacgcacgccaaggtccacgacgcgacgcgctacacgtgccccgatccggcgcacgacggcgaggccgacggcttgcgcccgagcttcggcacctggtcgcagctccaggcgcatcaaaaggaggctcaccctcctcgctgccactatgcgagctgctccgaacggccgccctttggctcgcgcaaggcgctccggaaccacctgaaggttcatcgtgagcgcgaggaggacgacgagctcctcgggccggaacccgcatcggacgcgtcggcgaacgagggcgcgacgcgcggccggaagcgacgccggagtgtcagcgtaagcgccggcgctggtgggagcgggactggcacgcccaagctgaagcgccgacggggcgagagtgtcgccggcaaggactggcactgcggcgacgtcggctgcggcaagtcgttcaagacggtgcgtgtcctcctctgctgtgctgtgtgttcgcgccggctgaccgtcgctggtcgacctacttgctctcgcccgcagaaaaaggcgctcgagacgcacatcgacacggcgcactatgcactccgaccgtggacgtgcccgcacgcggcgaccggctcgtgcgacaaggcttacggccaccggcacctcctcgtccgccacctggccaagaagcatccgggcaccgtcctcggtgagaacccgccgccgtcgccggtgccagggctaaagacgcccgccgagctcgcggccgagcgcaagtcaggcgagaagctccgcggcctcctgaccggcatggcgtttgtccggcggcccatcccgtgtccgttcgcctacggacccgagacgaccgacctgctggcgacgctcgggctcgaggcgcccgccgaggagcagaacgagtctggcggcggcggcggcacgtgcgattaccgctgctcgcgggcctacgacctgcgccggcatctcggcaccgcgcacagtgtcgtcgtcggcgaggccgaagcgcgcgatgttgccgaggccctgaaggaggaggagggggattgagtgagggctcgatcgatgctgctactgtgcgagtcgtctgctggaggccgtcgtcagcatcagccagagctgacagcccttgccagaatatcgccaggtgtgtcgtcaggctcataagattgctttgtttcctttttcgccgcctagctcggtggcgggccggccttctgcgcctcgccttgtagagccacgatctgacggacgattccgagtgtcagctagagagtgcgcttccctcgaagggagctcgccgccacgcacctccatcttcttcttctcactccgtgtcgtcaggtcctgcaagttggtttcgacgcgcttactactcattggagggtagggaaaggggttagtagcctgctggcaccagcagctttcgagatgaggccgacgcacatctccgagttgatgaactcgagccgcttctcgacgtttgactttgcctcggcttgctcctgcttgacgagacccgggccaatgagcttgtagaccgtgttgtgcggtttgagcagggcaaactcctttggaatgatcgaggcagcagcagcgttcgacgtcagccatccggtcgagcctctctctttcgctcaagcagctgtacctggaggacgccgtcattctccgacttctggctgtcgagccgctggcgggcctcaacggccttggtcaggtctgcggccaggacatggtgaggcagagacgctccggtcagcttcaaagcctttcctcggccccatctcgaagcttggatgcgctcctcgggcgggcacgaaacttgaggtgacgagcttcggagcatggagcaggagcgaggtccaggcggggacgcaccgttctgcagcttctgaaactcgtttgtcgccgtctcgatccgggcggtcagggaggccatcgttcaagcggagcgtgtgcttatgtgtgtcgcgtcggaagggatgagtgagagcaagtggttgttcgcaggcgaggtcgtcttgttcgcccaggcgcagggcggggcgcaaggcaggtcaagcgcagcagcagcagcagcagtctctcctctcctgacgatgccctcctacagcgcgaagcccgaacttcctgcaagctgcatacggaccggcaagcagtccgtacgctcctgctcgataagtgccccgaaggacgcggtcgtcgggtcgggtcgaccggctccgtgcaacacgggctctcaacgtcctcctcgccctcgccgcggccgcgtcggcggaccacacgacaccccggtccccagctgactcctttcctcgaaggaccgccccgagccatgcagggtctcttacacaacgtccacatcctggaaactagcagtcagtggcaggtatgtaggccgagcgggcgatgaagctgcaagaaagctgacccatctcgcatcgccgccccgccagccctcaagcgctcacggcctttagctcgcttcacctcctccctccgggcgacaactgagcaggcaccaagatgggttcaggcaaggagacgctcgccgcaccgctctccgaggtgcctctaccgcctggcgacgccatcgtcgagcggacaaggacgcaggatgtcctcctagtggtgcgtccccctcgccgtcgtctgcctctttgctcgccgccgccgctatcgagcccgtcgctgacagccgagccctcgctccctcagttctccatcagcttgatgatgatcgtctccatcatgtcgaaccagtcgattacaatcgccttgcccgtcctcggccgtgagctcggcatcgaccgaaccgaccttcagtggcccgtcaccgtgcgttctccaagtgcggccgcgcgctccacggtcttctgctgaccgatccctcctgccctcagtcgtacgccttggcctttgtacgtcctcagccggttaatcttccttccgcaagtgctgacctggctccctttgtgcactcaagggctgcctgctgcttctgctcggtcggctggccgacatctttggccgcaagcctatgttcctcggaggagcctttgtctttgggaccttcaacattgcctgcggcctgtcgcaaaacctcgtccagctcgccatcttccgtgccctcacaggcgtcggagcggcagcagccgtgcccgccggtgtcggcatcatcgcccggaccttccccccttcgtctcggacgaggtccatcgcctttgcctgcttcagcgcaggcgctccaatcggttcagggctcggctctgcctttggcggcgtcttcacccagtattcgacctggcgcggcgtcttctacttgacggcagggatggcctacctgccgatggccatcggctggttcaccatcgacagcgagatactcgaccccacacgcgacaggcgggtcgactggctcggcggattcctctcgaccgccggcctcaccttgctcacgtttggcctcggcgccggcccgactgcacccgacaagtggagcacggcctacgtcgtcgtctcactcgtcctcggcgtcctcctctgcgccggctttgtcctctgggagcacttgctcgtcaagctcgagcgtttcaccctcccgccgctcatgccgctgcgcatcttccgccagggccggctcggcccttgcctggccgtcctcttcatgggctggatctcgttccagccgtgcatcttccacgccaccctttactttcaagagtatcttggcctctcgccgattcagacgacgatccgcttcctgccgaccgccatcgtcggcctgattgtcaacttcatcttcgcggtctgcgtcccttacgtgcccggctggatcctccttgccgttggctgcctctctggggccgtgagtcccggcactgccaaccgattccctcaggctacagactgacgccgcccccttccgttgcacagctctcggctctcctcttcgcagtcataaaccccacagattcatactggcagtgggccttcccggccttgacgctggccgtcttcctcgccgacctcctgttcgcaacgtcgtccctctatgtcgccaatgtcgctcggccagaggagcagtccctggccggcgcgctcatccaggtcgcgacccaagtctcggtcgcgctcggcctggccgtcacgaccgtcgtcaacgacagcgtcgccgcaaaggacgcgtttgactcgtttggcatcgtcgcaaacgccgggcacgaaaatataccgccagcgtcgtatctcctcggcctgcgtggtgctcagtggacgtcgtttgcatttggagcggtcgctctccttctcgcggtcgccttcctccggccagtcggcatcctcggccacaagcggacaaagaagcagcgccagcggcttgcctcaaagcccgacagtccggccgagaaggtcgagggcggcggtaacgagaaggccgccgaccttgaggagggctcgtcgagctccgtcgtcgacaccttggaagcggaagcggagccggtcacgttccagcgcggaacgccccgctcgacaaagaggctcgagcgagcttagtcaccccttcaccttgttccggaccctttattccctgtctttcatagaaacgcgcatgtattcaagcagatcgctcagccgagaaggcggagcgcctcgcggagctctgaccgggccgtctcgacgtcctcgtagttgagggctgagatggcccactttgcgtgcttctggatcttctcaatctgcgcgagcgacaacggctcgctcggatcggccgcaggcggtgccggtgctggtgccgctttacgagcaggaggcgacgcgacggccggtggcggcgttgggaaagagggcggctgaggcggcggcgcgagatccgtcggcggcaagggcgagatctggatcgagtgcggcttgtcgggcgtgattggctgcgtcggcgggaggttgggcgagggcgagggcgtgcgcgagcggacgaacgttggcgccgaggggattgaggtttcgacctcgtcggttgacgatggcagcgacggcggctcgggaaacgacggcagcgcgggcgagtctcggccagagacgatgtccgacccgggcgtgacgttcccggggagaccctcgaagcggaccttcgagttcttccgcttcagcggagcacgaccgccgccgctgccgccttcctcctgacccgcaaaggggaaccctgccgagcccgaccgcagctcgaggtcatgctcctcgtcaatctggccgggcgtcgctgctgcgctccaagtctgcgtgctcggtccggcgccggcctcgtcgcgggcctgggtgagcgccgctagcgtctcgtcggcaggcgccgcaacgacgggaggtccagcctgtggcgtgacaccagacttgaaagcctttgcgagcgaggccgccttgaagcgggcatacttgagctttgcctccatctggcgacgggagatcgaggtcagcgcggtgttcatctctcgcggcgggcagcgagcgcacgcacgtctggctcaagctcgccctcgccaaacgaacggacgacttcgataaaggttgcagccgcgagaaacttgcggattgtggccctgcaagacgtgcgttgacaggcgaggcgtcagcatctctgtaatgagggggcctgcagcgcggggactgacggtgtcgccttgccggcccggtcctcgtcgtcggcgccgttgaagacgcgcagggcaaaattctcgacgtaggcttggcccgcaatctcgtttgtgacggcatcattgtccttgagtagagccttcatctacgtttggggggggggcaagcggagacgagaagggggtcagctcgcaggagatggccggaggccgctgcgcttgcaggggagggcgaggcaccttctcgagcgcatccaggagatcgagcaggaccatcgtcccctcctgagtgcgtttgtcggcgactccgatctgagcagctcggtagcagcctatgcgagagcgaaggccgagtcgtcagccaaggggtcgaggaggcggtggcccggagaagagcggcggcggccgcacaccagtagcacatgacggcatcgtgcgacttgagctccttggcccgcttgaggacgagatcggccgccttaagctcgggcgggacgtcggtcgggaaagtaatctgatccatcgtcgtcgagaaggagaggagatgtggtcgggagggaggagagcagcagcgtgaagcgcgtcgccagagccccttcgacatcgacccgcactttcccgcatctgttacttcttgccaaggctcgacgatggcctacggagacggttacggctacgacgacgacgacgaggacgaggacgagctcatggaggatgtgcgtctgttctgccctttcgagctcaccaccagccccggctgacacgcgcttccaccctctctccctgcctcggtcgctcccgccgtggaccagggcgccgcactcagggatgccgtcctgatctgcatcgatgcctcgacctcgatgcaggcgctccgcacggccgaagcgatcggcctcgctgtcgacgccggtgagccggccgagacgtcgttcttcgcgggcgcccttgactgcgccctgtcgcttgagaagcgaaaggcgttcgtctcgccggacgattatgtcggcatcgtcgtctacaacacggtgcgctggcaaggcaggactgagtgaagcggaccgtcaacctgacccctcgtcgctgtcccgtcctactgcagaccaagtcgatggaggagcacccggacgccgagccgagcggcatctctgtcctgcatacgctcggcccgatcgacgtcgaccgctgcaggtcgctcaaggagctggtcgaaagtgagcacccatatctaaccgtcccagggcgagcaagctgaccagagcgagccctttcccgcttccctgccaacccagaggccaaggcggacccggccgcattcaagcgggccttcccgccgatgagcccagaccacgagcagcgcgtgacgccggccgagctcttcagctatgccagcggcgagatgcggaccgcgtgcgttgccctgctcttgtccgagagagcgcgctcgcgttgatcgtgctgacacgcgtcttgcggctgaacagcaatctcaacaagggcaaccgccgaatctttctcatcaccgacgacgacgatccgtgccgggccaaggctgagcgtgaggaggctggggcgtctcagaggccttcgcagcgtctgacgccgcgcaagaagaaggctgggatgtacagccgcttcccggggccagagcaggtgaccgacattgagcgcacgtcggaccgcatcaaggtctgtgccggcttcgcatcattgtgcggtgaagcgtcactaacgatcgcttgactcggctgtcgcaggactttatgcaactcggcgccgaagtcattccgttcttcctcgcggccgaggacgaggagtttgacgtcggcaagttctggggcgtgcgtcgatcgttcttgacagccagcagctcggacgacctgaacgctgacccacaccatgccgcgatcaggcggctctcatgcgcaactttgccgctgagggcacatcggcctacggcggcatgacggccttccaggacctcctcgccggcctgacggtccggcagtcgaccaagcgcggcatctttaccatcccgctgacaatagctgaggacgtcgtgattggcgtcaaggggtacgtacaggcccagcgagtcgccagggctgtcagggtcctgaccggtcccttctccagctttgcgctgctgatggaagccaagaagccgagtacaatggcaatcaacacggatggcgaccggccggtcgaggtccagcggcagacgacctactttgatgccaaggctggcgtgagtggggtgttgcgcccttctcgctcgcggcactcgcactgacgcctcctttccgccattgcagtcagagctcaaccccgcgtcttacgccgagtcgattcgctacgtcttccaaaacggcaccgtcggcgccgaggatgtcccgccggaactccgccggcaggatgaagagtatgcccgacagcaggaaggactgcggccgatggacgtcggcgtgtcggatgacgaggctgggccgagcacgaaagccgaggtcaaggacgagggctcgaatgccaacgagtttgacctcgcgtggggcgtcgggctgaagaaaaagccaaagaagcaggagcagcctgtagtgcgtctgacgctaaggccaagctttcgtgcttcctggcagaagtgtctgacctgctgaccctctttcgccctcacccgtcgcaggtgacctacacaaaggccgagctcgctcagatcggctcatgcggcctggaacccggtgcgcgcctggcttcgaaagtgctcgccgctgccagaccaaggcctgacgcacttcgtccgttgcaggcattcgcgtactcggctaccagagccggtcgtgcgtctcgttcgagcgcaacgtcaagacgccctacttcatccggccgaccgaagaggtgcgccgccgcaactgtcctgcttcgtcagtcgagcctgaccctcacctctgccctcgtcgcagaaatacacgctcggctcgacccggacgtttgtcgcttttatgcgatgcatgctcgaccgggaccttatcgccatcgccctctgcatgttccgcgcccggtcgacgccggtcatctgcgcgctcgtcccacaggtgcgtgcgtctgtccttcctggggcctgcatcgccctgacgatcgcttgcactgccgcaggaggaaacctttatccccgccggcgacccgaatggctcgcaggacaagccgcccgggatccacgtcatcccgtttccctttatcgacgacatgcgcgagtacccgcaggcgatccagaacggcggcgccctcatccgtgcgtcgcaagccgtttgtcttgctcagacacccttctgacccgcgtgcttcaccaaaaagccgacgagcagcacgtccagatcatgcagaaggtcatcaagaagttgactgcccgggccggctacaatccagaagacatccccaacccgagtgagctcgtatctctcgcggctcttggctggcacgatcagccgactgacgctaaaccaccgcagcgctggcccgctactttgccgagctcgaggcgcgggcgttccaggacgagtttgacggcgagcagatcgaggaccggtcgctgccgatcgccgacgtcatgaagcaggtgcgggcgtgctcggaacctgtcactacaagcaggcgctgactctaccctacctcatgctcgacagcgcgccggcgacctcctcgtccagttcaaggagtcgatcagccgagacgcgcgcgcgttcatgaccgccccgacggcggcaccgaagcgcaaggcggccggcgccgacgtcccggcggccaagaagcagaaggcggtgcgtctggggaacgtctctcgtctcactgctagcacaaatgccgactgctacttcactctggcaggccccagacgaggacgagcccgacatggccgacgtccgtgcggcctggaaggccggcaagctcgcccagtttaccgtcaagcagctccggcccttccttcggcatcacacggacatgcatacgaacaacgtaaaaaaggccgacatcgtcgccgccgtccaagcctactttgacaagggcgagtgagagagagcgaggcaggtaagcggcctacgcgtccacggccgcgcagggagggagcgcagaggacgaatgacaagttcgatcgacgagtaacgacccatgaatgaaagacgacgtctccgaaacccatcccccagtgctctctccctcgtcatgagcagctggacagggcgaggctccggagcacgaaggcaaggcaaggccagtcgtcgatcgaattgcgcagctcgaccgtcggacgcgccggctcgttccttttccgatcctccccctgctccctccctccacgacctcgacagctttcccggccctctgctttcttctcgcccgtgccagcctctcgaccgctacggtgtcgcccctccggccgtccaacagagccaactcgccaggaaacccccgggccagcagcaaggagcgagcgaagcgtgcgtccagctggacggcgaaacgacgctagcgaccctgtctcggttggctcaaaacgctgaatcttccgtcgctcgtttcctccttcctccttctcgacgatagctgcccgacgcctctcgcaaacctttacctcgtcgctcgcagacagcgccacacccgccctccgccaccgcaagccgcggacgagctcgcaaagctcagagaccatgccccgcgcctacgaggccctgaaccggctcgacctccacaccggtggccgcaaccccgcccggacgggtcggacgagcgccggcgcctggaaacgctatgcgatctttggcggcgtcgtcattggcgccttgctcttcctcgccaacggccgggcgcgcttcgctgctgccggcgacgacgacgtcggctcagccgacgaccgctacgagagtgcgtgtgccccgggggtcggacgaggctcgcgcctgccgctgatcgcagacctcgaacctcctccttgcagtgccgatcaagacgtttcccatcagcgaggcgcccgacgtcgtcggcggcatcgaggacgtcactccgcccggccatgccgactttgacgcgcccgaggccatccaggacgagcccgagccggcaaaggccaagcccaagaagccggccaaggtcgtcagcacaaagccggcgtctgaggcagcggcgaagccgaagggcccaaccggtcccgccgacgacccggacccagagaagacgacgtactgcacggtgccgttcctgggcaagaagctggtccagtacgcgctgatgatcgacgccggctcgaccggctcgcggatccacatctacaagttcaactattgcgaggcctcgcccatgctcgagtacgaggtctttgagcagctccggccgggactctccaagttccggggcaagccgctcgaggccgctggctcgctcaacaagcttatggagctcgccaaggcgacggtccccaagagccttcagcactgcacgcccgtcgccgtcaaggcgacggctggtctccggctgctgggcaaggccgacagcaacgcaatcctcgacgcggtcgagcaccacctcaagagcgattttcccttcccgctcgcgccggctgacccggtcgtcgtcatggacggcaaggacgagggcgtctacgcctggattacagccaactacctcctcaacaagattggcgagggcgcgaccgagaccgacacgcttgccgtcatggaccttggcggcgcctcgacccaaatcgtctttgagccgacgtttgccgacgacaacctctttgccgacggcgaccacaagtacgctctgacgtttggcggccgcgagtttacactctaccagcactcgtacctcggctacggcctgatgcgcgcccgccggtcggtccacaacctcgtcgcctttacctggtcgtttgcccaggagggcgacgtctgggcgacgctcggcaaggagaccgagattgccaacccgtgcctcggcctcggccggcgcaaggtcgtcgaacttgaccctcccggccgcaccccggcctcggtcaccatgatcggcggcgccggcggctacgaggcctgcaagcgggtcgttgagctcgtcatggccaaggatgcgtgcgtaggcgctcatgctgcgctcttccgcttgctcaaaggctgatgatgctcccgcccggtactcctcttcagcatctgcgaggtccagccgtgctcattcaacggcatctaccagccagccctgattgacaccttctccaagggctccttcctcgccctctcgtacttttatgaccggatccggcctctgtttgaggcgacgaccgacgagacgacgccctttacgctcgagacggtcaagacgatggcccagcacgcctgccagggcgagtcgcactgggccaaggcctacaagggcaacgccgtcgcccttcacgagctcggcgagcgcgaggagtactgcctcgacctgacgtttatgcacgccctcctcggcctcggctacgaaatcggatcggatcgcgagctcattgtgggtcgcctggctcgccgtctgcgccatcacctttgctgacatctgctccatcgtctccccaactaggtcggcaagcagctccgcgacgtcgagctcggctgggcgctcggtgccggtcttgcgagtgagtcggccccccttctcgctctcggatggcttctcccgctgaacggccaactttgcagtgctcgacggcgacctccaatgcctggcctaaggcccagcctgcagctactccctttagaaccgcaaccggtcgggaggaccgcagcgcggccctgcccagaccttccgcgaggtcccggacgacccctcacgatctatatgctctctctctccctagatccctcggttcgctcggaagcggacgtcaacatcgcgtcggctgctcaacaaagacaccttagtaggactcgtaaaggggtcttcagaatcactccttgcgactcgatccgccgaggatgtctcctgctgccggcgccttctctgcggcaatctcctctggcctgcagcggtaggtcggacggagcgggctggtcagctcctggcagaaaccgggcaagcgaggagcgagacgcacgacttccagatctcctgcgtggcgtgcatgagctcatacagctgcccgatttgctgcgggagacggagggtggtgtgtaacggtggtcagcagctacgtgcgcgtcggaagatcgtcacaggcgagcctcacctcttccgacagctggagaagagggcaatgcatcagcaatcatcgatcgatcgacgctcagcgggccagcgggcgggcgcaccttctcgtactcgtcgaggtccatcttcttgccgcggatgccgttcgtcaggccctccttggctgcctggtcctcgagcagctcgaggtacatcttccactgctggaggaagccgacgatgtgtattgggttgtcggtcgacttgtgcaggcggaactctgcaggtagaggaggacgctcgcacgtcagcgagagagggcaaggtgaagggagggcgcggcaccaccaccgagacgcaccagagcgaacgtaggcatcgccgaggctcctcatctccagaggcaagccacggtggacacggagcacgcggcggtacagcctggcaggatcaaggaggcgtgagggtcagaagccaagccagtcagggaggggtaccacggctacacacgggagcggcgggagcagcgcctttgagagatcggagacggccttggatggcctgctaggtgcagctgcggcggcataacggagcaggagagagctgtgcatatctagtcagggcgatctgcaagagttgaagggtgagaggagatagatattgatccggctgggtcgatgttgcaggtcgattcgagtcgagcgacgtcgagagccaagtcgacggcagacgagctgtctcccgccctgcatctcacctcctggcccaatctagcttgaccctcacagcttcctccctgggcagcctgcgcacggatggacgacctcaacgacctcgtctggactcagccgagtggcggcagcggtcagaagaacggtctcgccgccggcgccggtcggacgagctcgcccttcgcgtcgtcgttcgacatgctcgccggtacctcgtcggcttcgtccatcaaccggtcgtacaattcgtcgccgatgccccggtcgctgacgccctctactgcggcccaagcgccgccaaacccgacccggtcgcccgtcaacggcggctcgggcggtggagatgcctttgcgggcctcctctcgctcggcggcggcagctcatctctggcggcgccgaccggcctctcgctcgctcagcggcaggcaaagctcgcggtcgaacagctcgagcagaagaaggccgaggccaaggcgttccatgcttctggctcgttctgggactcgttcgaggggggcagcacgctcaagcccgccgctgccatgccgactccgtcgctggcgcccgcagcccggacctcgtcccctctcctcacgccgagcggtcggccgacgacgcctgccgccgcctcgctgctcaagccagcaccacgaccttctgctccctctgcgaacgtgcctccggcaaacctcgacccctgggacgagtttgaccttctcgcctcgcgtgctgcgccggtcgcctcgtccagccgatcacaggccgctgcccctgcggcagcccgccctctgacggacccctttgatctctttgagcaggccgcaccgaaaccgccttcagtatcatcagcaccacggacgatctcgcctcgagaccacgaatttggcgaccggcctggcaccggggatgacgtccgagggctgatggccggcggcgacgggagcgatgacgacgacgacttcatgggtgccttcaaccgaccgaagccgcaacaggtccgtcgaaattagctctgctgcctgatatccgatcgtcgcctgacctgctgccccttgctggccaacagtcgagccgactggctgcgcagccgaaggcctcagcacgtatcacacgaccaaagtcgccgcccatccacctgatcggccagctcgtcgagatgggcttctctccgtcggctgcaaaagaggccctcgcctcgaccgagtccggggaggatgtcgagacggccgccgccatgctgctcagtgccggcggtggctctcgatccgccggcgcggctgctgcaggttcggccagcgacgacgacgacgacgagcagcagcaggagagggagcgtcaacggaaggaggaggaggaagtcgaacgccgacgccgtcgccgtcagggtccttcgcgctcagctgtcgctccggaccgtgccccctcgccggccaaccggcccgagacgccgtcgggcgacctcgtcgcgccgctccaggacctgctcgcgacgaccaacctcatcggccagagcgtctttaaccgcgccaatgcgttctggagctcgagcaagcagcaggtccagaaggcctacgaggagcgccagaaggccaacggctcgcctgcgccgggaatgccacgcgacgggcggccgaagtggatggtcgacgccgaggcggctgatgcaggcgagtggcagaagcctcctgccgctcggcaagagggagctggcagcggcggcggcttcagggacggcgatgacgaagaggaagccgagcggccgcggccacaggtcaacgcccaggcctcgtcgtctcgtcgcccgccggccgtccagcagcaggccgccccctcgctcatcgagccagaggcaacccgctcgtacacgtcgtcacggcggcacccgccgaagccgacctcgtcgcccgggccgacgccgcgagctcctgctcgtcagccgtccccggccgcagcgccgctcaagcagcggaagctcgtccccgcgccaccccagatcctcgacgccgccgccggctaccgaacaaagggcaacgccgcgttcaagctcggtcaatttgcagaggccgaggctgcgtattcgaccgcaatcgacatcctgcccgacggccacctgcggctcgtcccgctgcttaacaaccgggcggcagcgcacctcaagaatggcgaccactcggcctcagtcgctgactcaagcagggtcgtcgccctcgtcggcctcgactttgatccggtaaaggaggctccactgccggtcgagctgggcgacattgcgctcggggacgcgctcgtcaaggccgtcagcaagcgggcggccgcgctcgaaatgggcgaacgctgggcgcaggctcaagcagactgggagctcgtcagctcgctggccgtgtgccagggcgcgtcaaagacggcggcgctcgacggcgcccggcggtgcaagaagatggtcgacgtcctcacgggcaagtcggcgcctgctgcgcctgcacgacgagcagcgacgcccagccggccagtcgcccggccgagaccgaaagcggcgcccgtcgagggcggtgcgtcggcccggctgaaggaagccaacgccgcgctcgagtccgaggacgccgagcggtccgagctgaaggacagcgtcgacggccgcgtcgccgcctggaagacgggcaaggaggccaacctccgggcgctgattgcaagcctcgacggcgtcctctggcccgagctcggctggcagaaggtcggcctccacgagctcgtcaccgacaagcaggtcaagattcgctacacgcgggcgatcggcaagctgcaccccgacaagctcgccatcggccagacgacggtcgagcagcgcatgattgccggcgccgtctttggcacgctcaatgaaggtccgtctggcgtgcgctcttccccccgtgtcgacgtcgactgacggccgatctctcaacagcctggaacgcctcgcagaagtagagcctctcgcccgtctgccgatgaaatatctaccgtgctcgtcgctctgccgcctcctgcttctcatcgtccggcagattgtcctcctcctcagccggcttctaagtctggccgccatcgcccgcttttggaaaccgcgactcttgaaaaacaatggtcggcgggagcagggcgcagcaggcttcgcgagcgcgctctgggcggcggcgtgtctttcgcttttgggcggccggccctctccttccacttccaccttcacccccttccctccctttcttccccctttcccggactacgccagaggacccttcttgcaagaaggagggaggatcgtgtgtgagagaggaaaggagggggagggaaggggctgaacgaggcagcctgcgtgcgattgtcgctcctgctccttctcttgccgtctacttgctcactcaaagcctctcccctccccccctctcgcttcagataacgcccgagagcgccaccgccgccgcaacgtcccgcaaagaagttccgcggcgtctttccgaccctgcgcaacctcctcgctcacctcgacctgcagttcgtctagtgggatctcgaccggctctcgcgctggtccgctataggaacagatcatttaacatccggcgactggcgcgaaatggtcgaccgtctacccgactgccctgcctcgcaccccgtgcgagcagtaatgtggccggacgcgcgggactggcgtgttgcaaagcacccccatccttcctttgcttttcgtctcgccgcagatgcatgtcgacggtcactcgtcgtccagaccccttgtgcagcaccgcccgtgcgaacgctcccgacagccgagacgacaggtcctgcgcggcgtcctcttctcggccggcgccatcgggcgtctcccgcccgcgacgttgcgcctcgaggtagccggatctgcgagggcgcaaagagaccggttggccccttctgatccgaggggccggtctcgtcgctgctcaaagcgactgactcgagcgacgatatgtagtcgtttgtcgccttgagcgcaaccggcggtccgacaactctgcatgcaggtcagcattcaatctcgtcagcgcccgcccgttagcatcttcgctcgaacttcgcagaaaagtcgccgatgtacagcccgttccggagcgcaaaatacaacaggccgcgccagtaagggtcccgcgcgaggatctctgcgctgccgacgatgacgagcgcctccttcgcgcgcgtgatggcgacgttgaagctggcggaaggatgcagcatcagcagctggaagaagggctcggtaactctcagtgtagaaaaggggcgcaccgcttctgctcaaagacgaggccgagcgacttgcgaacgtcctgcgcgagaaagcgcacgcgagcggacggttgagacgatagtgatccgcttctcgcgcccttgataatcccaaggcgcgatgcacaaggggagttgcaagggagcgcgtcagtcagcatcgtaccaggacgcgttcgcgtacaagcgcccccttccactgactgcgagggctcggcgcgaggcctgggcctcgacgccgacacgaccgcttttcctcgtcgactgtgaagggcttcacgttcttccccttcccctgcctcgttgccatcaggaggcccaccagtctactctccggaatcgaacccttattccccgttaccggttgaaaccatgataggcctctatcctaccatcgaaagttgatagggcagatatttgaatgaagcatcgtcggcacaaggtcatacgattcgagaagttatcatgaatcaccagggaagcaattgcctgcgttggttttttatctaataaatataccccttccagaagtcggggcttttcagcatgtattagctctagaattatcacagttatccatgtagtaaggtactatcaaataaactataactgatttagtgagccattcgcagttttacagtataaatttgtttatacttagacatgcatggcttaatctttaatctttgagacaagcatatgactactggcaggatcaaccaggtgactattccagttgagccagacaattaagtctgaccgcctcgagattcgcaatcaagcaaccttcttggcttaggtgttcgttcgagcaccgagaagtcgagtgtaccggcgcgcgctgcatcggagcagatcagcgggccgactggatgaaaggacgcactcgcgtcagtggttgggtctgacacagcttttgagaggctcggcaaggcgtacgctgctggccgtcgccgcacaggaccagctgcggctcgtgctcgaccggtgtgtgttcagaaggtaatacaaccgaaattgggacgagcagctcaggctcgcttcacctagtaagcacctcgtcgacgatcaggtgcgtccagtgcggtcgcaccgagggatgactgcccgcgccgtgcggatgaattgcagaggcgacgcctcgctcgagcgatccgagtttgcggtttgagacgcgcgcacggataactatggccgcgtcggtggcagaggtgaggacgatccggtaacgcatcagctgagcaaaggaagggactgcgttggcgaaggacgactgtcagcaaatcggaccaggcgttgaattgtatccggagccggacggacccgcaaagtgatcgtcctcggtcaagcaaaagggcaggctgcaagaccgggttggcggcatcagcttgaagattcgactgctatgctggcacaaggcgggacgcacatggcctctggcacctcagcaactcgcggtcgttgaggcggagcattgacaaccgctgtccttggccttcctcgacgccgagagcgtgcagaagacgcaggcaaagcgtgtcggtcgccgagttggacggcgcgacgagcaggatcgtcgctgtcggctggaggcgcaagatttgcagcgcgagctcggtgaccatctgcagcagatgacgtgcgtcatcagtcaacatccgcgaagcatagaagtgcgcgagcggcgccgaccttaggtttgcccgtgccgaacgggcccgagacgagtagcggtaagcgcgagcggtagagagcattggcacggacagcactctgtagacggcccaagtcagtcagctcgagcgagacgtcctgaggaaagacaagagactgcggacccgctgctcttcattgagattcgagtcgacccagtcctcctcggcgatgtgagtcgcgagccgcattacttgctgcgggtcggcatcggcaggctgagggaagacccagaaccgaaggacgctgctgcccgccgtctcctgcagcaatattccgtcgacttcccaggatcgatgtcggcgctgaggaggttgccagcaagcgtgaccgctgtcgcctgctcgagcgtcagcaatgatgaagggaagaagaggaagctcatcgtcccgcagacattgccctccttcgtctccttggcgcgcgaggccggccgaagaataagagccttcagagagaccggaaccgggtgctgcgaggacgtcaggtgagagatgaggctcggcacccggaggtctgccaacgagcaaccagacaaggtcagtggctcacacgaaccgaggggcaatgcagagaacgtacaaacgaagccctcgcgtttgctgacgctgacgacatggctcatcaggccctcgtcgctcccggtcgcccagttggcccagacctcgcgcaggagacacgcatcgccaaggctgacctgcggccaattctccggacgcccgggacggggactcggacgagcgcgccggcgctttcgccgacgctcgggtcgagcaggacgaggggcagcttgtagaggacgagcgatcggccccgccggctccgtgcagccagctcgagagcgaggagatggctgaagcgcgcaccgtaggtcgaggccgtctgcggatgcggccgctgatgcgtgtccggtggcgctgactctagcaggtcggttctgattagagtgggaagcagcgccgaggggtagaaggagtcggtgtagttgtctggcgggaagcgcggcagggctgccaagaggtgcacatgcgtcgaagggtagagttgcaggtcgcgcaggtattggagtgggaaggtgtcggcctgcgatgatgagaaccactgtaagcgttcggatcggcttgctgaagggactaaggggcgagtacgcacgtaagcgtccaggcctggtgggttcttgtcatcattgaaggccccaacctggccatccggagcctgaccgaatgccgtccgagcgtcatctgccagccagttggacaggccgggaccgaatgacggacccctggaattagccgacgccggcggtgcgaggacgtacgtggcgccctcactcttctctcgacctccgggccgatcactcgccgatgcggtcgccgtgctggaagtctccgcccccgcccctggcccgatcggtgagagcaggtcgacccacacctggtcgatcggcccatcgatggccgagccaagagcattttcgacgagggcggtcgctctcgccatgttggccgcgagcacgactggcaccgacacgctgagcgcctagccgagctgaccggaattggccgatgacggccggggagagtacgtgccgtacacaaaggtccggagggagatgggatggctgatcgtagacgattggtggagcgaacgaaggcgagtgatgcggctgctggccggggtaaaggtgctgcgcaggcggcaggaagccttccaacgtcaccgacggcggcgacgcccagggagtcgagccttgtggctcaatgaaggcaggcggaggagtccaagctccacttgtcggatcaagctgggcgcaaaggagttgaaggcagcctgcggcgggccgagagcaggaggaggaggaggagggcgagccgacaggggttggggctgatgccaggagacgccatcgctggacgcccaaggcgagctcagaggcggccgattgtaaggtggatcgactgtgagccagagctgtgtccagcaggaatctgtcccggcgggctgctctgccagatgaagtgcggtcgctcttgcggtggccggacgacaggcgggttccgagcgcctgccccggcgctagacgacacgacctgctgagctgatgcctcgggaaggaagccgtttgtagctggcttgccggagggcagcatccgctgagtccaagcgaccactatctagaacggaagctgaagagaagacaaacggctagggcggtcgagacgaggtcgtggtcgggcggctgacggcacaagggggcgctgcgcgatcgtcgtcgcaccgcgtcggaagacaacgttgcaacactgattcagacatattggggcgagaggaacgcgcacgcttacgcttcctctgacggccgcacccctggcctccgttgtcagtctgtcaccctgctcgggtccgatgggtcgacgacaagtgcatcgcagagattgcctccaagcacgacacattggccactaagcgacgagggcgagagccgtcttgcggctggctcggtggccggggacggcgccttcttgaccccgaatacagcgcagagagacgctggatgggtatatcgggtcggcaacgtcgcaagctgggctggccgaggttgtcgagtgtcgggaggcccgtcggcgagctgatctccatagatgcgagtgatcgttgagcagcgctcaagcgtagacgaagctccagaaactctgcttgcctgacgctgccgcagcctccttgtcctggaccgacgcgatcggagggcctggggcgaacgatgccggggtaaacgtccggtcggcgtcctcgacctcactgtcggtgtcgccggcgcctcctgctgtcggcacaaaggcaggtgaggcgtgcctctcgggccggtggggaaggagacgctgatcgccgtttgtgagcgggagccgggcgagcgagtcggcgagcgatgagattgctgcagacgagaccgactcgtcgtccgaggtgtcgtcatcctcgtacgagagaacgttgctgtcggactcgaccgctgcgcgtgcggccgtgggggcagcctcggcgggggagagagcgccagagtggatggcgaggtcgcgaatgagaggcgctagacgagtggccggcccgtccagctcggcttccgactcggagtcccacgagccccagtggccgccgtaagcggtcgaggctggcccagcatcggtgtcggtgcccgagccgttgacggatgagaggtcggtcgtcggcggggtgtcaagcgtgccggccgaggctagcctgcgggaccgatggtgcgacaaacgagagggaggaaggagaatgtgcgtctggcgtttcccgtcggacgttggcttcgagaaagagacctggattgcgttgcgcgatggtactcgatcagcgacaggaaggccgatgggagggcacaagcggacgaacgaggttatgatggcgggcgacgcagtggacaacaaagcgctcgaagctcgcgccgacctcccaagtcagcgaagccgaaccgcgctggacctcgacaatagcctcggtttgtggctcgctctccttgccgacaaggaaaggatcgacgacgcgtcgcgcacgcgactgacgagtcggaaggacgacgacgctcctggcgttctcggcgatccagcggtcgagctcggcctcgacgagcttgacgagctcctcagcccgggcgcctttggacctgagctggcgccggacgccagtcagtgacatgctgtagcgcccggcctcgccgctgtgcgggtccgacgtcggcggcggcggcgacggggccggtcgggtccgaggcagcaggtgcgccggcagcggcgagggaaaggttggcttggtggtgggcagatagagcgtcgcgatctcggatcgcgttggaggataggcatgcgggttggaggcgagggcgtctagagggtcgacagaaacaagtcggcaggtacgcgtcatcgagcgaccggagcagggagagacgcctcggtcagtcctcgagttgtgtcgagcagatgagaacgtcagagtcgcaccgttctctcgcctgtttcgcgctcgccggccctcgacccgcttcggcgccttgccgagcgacaggcctggccggccgctagggtggtggtgcgcccgctggggctgatggaggtgagcagggatcgccgacttgggattgcggaggatcgcaggcagcgagagcgggagcgggcccgattcggccggcgtctgcaagccctcctcgatgagcggcgagagcgacatcaaggtgtgcgacggagaggttgtaggtcgaatggaaggtaaagagaggtgagagagagatcggcgtgcgaggttggatggtctcgcggtcgactggcggcagagcgatgcaggtccgcggctctctgatgcagatctgaaggtccttcgcgcgcgctcgactcgagctccgcctcctctcccttgtcgcttgcccttgctctagttcagcaacctcttagacgcttcctcgcacctctcgctggctccggtccttgctgcctaccctccagggtctcctccggaatggccctccgacaagagacggtcagcctgcttgcgtcgctcgcccgtccggcagccgcggccgcgtcgacctcggcccctcgagctcgtgcgtccctccgagcggttgtcctgctcgcttcggcgtcgccggcggtaacaaggctgattcctctgatctacccatgcatgcgcttgctacagggagatcgtactcggcagcaggcacggccgaggtccgccggagcgagtcagacggcaactccgccgttgtcctcagcaccctccggcctgagcccgagctgccggccgccagcggcagcggcacgacgagcaacgactcgccgacgactttgcggtcggcccccgcctcgatctcgaccttcccaccgctagcgtatccgctagcggtccgatcgtcagagcctgcgccgtcggagctcacctatcccgagtccagctcgtggcggctgcgggcaatggatcgcgcgcctgacgctcagcgccgtccggccagcaagcccgagccctcgtcggcgataggagctccgggcagcaccgtctcggagaagatagaggagcccgacaaaccttccgatgccgaggtgctcgactttctgcgagaccctagccgttttccgccggccaccctcacactggcccggaaactcgtatgctcgaagccggggaccataactctcgagaatttcgacaagcaactcagggaagactttcgagcgcgtgtcggccgcggcctcctttcgagtattgcgtgcagcaagctcatttcgtttgcttcgaaatggcaccgccaggcacggcgtgaccctcgttcggtatcaaacttcgacgccgaatggcttctcttgctgcagtcaccgcctgcgcgtaagaagaagaacaaagctgcaacgacgcaagtcccgtcggacaagcaggcacccgtcccgaccgatacgaggaggccaagcacagtcaagcccaagccgcccgcacctccgcccgtggcctcgtcgtcgtcgtttcccaccttggacaagccgcccagcaaggcttcgttgcagcacttcgaccggccgcggtcgtcttcgtcgccggtctcgcctcgagtcggcaaggcggcgcccgccgctatgtcctcgcgtagcttacggctcaatgcagcgctcggccagtcgctctcggcagcgccgccgatgccgacgctcgagtcgaccatgtcaagccttcagcacctgatcgaagtcttttcaacctcgctcgcgccgttcgcctcggatgcgagtcaaccgctcgcaacacatctgtcgtttcctgaggcgctcgaggcgaggcagcgccaggctaaggtccagcaggccaaggacgtgctcgagctcacgcgtcaggctctccaggggatgtttcccggtacagggcctgctgctgcggcgcttcaagcagttcaagccattgcgcctgcgatgcactacaaaaaggagcggccaacaacgccttccgagccgcccaaggcgtcgtcgaaaaagcagaaggcttcgaagaagaagactgcccctgcaaggtcaccggagggccacgcaggcgaggtgccgccgcaacaaagcctggctgcgactcccaaggcggacgcccaatcgcccgcgccggaacctcgacccaaggcagaggagcagccgctaccgtcttccagcaacaacatcgcacaggctgcggctccgacaaggccgcgagtcgcttctgcggcccagccaaggcctgtcgttactgctcctctacctgagttcttgcccgcgctttcgacggctctggctcctgaacggtcgtcgtcggtcaatgaggagccattgtcgacccttgttctcgccgcattatcaaaggaagcgtcgactgaggcggaaggccggtccaagccgacagccactcagtcgagctcgacggcaacccgcttcggcctgccttcacagcgggtcgcggcgcctttgacaacacgcctcctctcgatctcggcgccttctcaacgcgaggccacggcccgtccgaatcgcaacgatgcagcagcggcggccgaccagaagcggttgccgccgcccggaccgccaaagcgcgacctcaccaagatcgaggactacgtgcggggcgggcggtacaagcagctcgtcatcctcaccgacggcaacaacgtgccgccaccccgtcgactgatgccatcggaagacgctccggcgaagtcggcgctcgcacgcgaggcgctcgaagcctatcagagacatacacctgaggccaggtcgtcctcgtcgaagattgaggttcacaagacggccgcccttgacgcggcgacagcggccccccgggtctcggaccggcgaaaggcggacccagtccgacctatcgtcgtccggagtcatctcgtccaccgtagcccggccgctgcttcaccgccgaggccgacaccgccgccggcgccgccagcaccggtggtgcagctcgaagccgacaaatcctcattgacaccggccgcctcgtcgacccttgaggcgctcctaccagaggaggacactgttcagcccatgccgatgctgcatgccaagaaaaatcgtgcgtctcttcccgccagcttctcttccctgctgcgccgcgctgattttctgtccccccctccccttgtcctctgacagaagaccagtccctgcagcgaacccccctcgaggatgcgctgaaaaaggcggtcgggacgaatgaagtccgggcggtcatccaaaccctggaaaagacgaccggacggaacgaggagatcgtgccgggcagcttttggactgccctcgtcggtgcgttcttgctcttcgctccgtcccggcctgccgcccttgctgaccaacttgggtgcctcgcttgggtcaatccagccaagggccggaagatctcagacttgtcggtcgcagccctgccgatgctcaaggccgaccgcctccagatcgagcccccttcgccgagccagatgacgatcctccgcgaggttcttttcactatcctgcgcacagacgctcggcaacaggccaagctcaagccttcgaagagccttccgccgcctcctttgccccttacttgccgctcgctcaggctctttctcaacgcttcgccggccgatccggtcatctgctcgctcgtcctcaagggcttcgccctgctcgggaccgccggcgcgcaagacttccacgagcttgaggaggtcatcctcacccggtcggcatcggccccgttcgagccgatccccgacgtcgatccggagagggagagtcagcacgccgtctgggcgctcgaggcgctcgactcgatccggcccttcgtccacccgcgcgttctccgctgctgggcgggcgtcatcgacccgaacgacctccactaccatcggagccggctcatcaccatcgccgaccactttgcctccaagaagccgaagccgcaggccaaggtcaagggcgagcgtctttacaagctggcccacatggtgtcgttcccgcttcccgagatgccgcccgccgtccggctgatcgacgcctatgtcgagacctcgctcagcagcctgtccgctgccaccgacccgtacgcccgctacgccgctcgccgcgcctggagtagggccgacccggcagaggacgcggtcgagctgcttgagacagccgagaaacgctttggccccctcgccgagccgatgtctgtcgagcagccgctggcgacgcatgccgactgggcgcgtgacgacctcaagaactaccatcacgagactggaaccgacagctcgaccgagctcctggcggccgtccgccgtgtcgtccaaagcgacacccaggcccttgtggggtcgcctaggacttcgccgactggtgtccgaagccgcagttggaagggaggaggaacgtagatggcgggctagacttgtcgcttcacgaccccgatacgatttcttaacgacccccggctgccgcgcgcatcagagagtcagagaacatgctgggcactgtcgaacgtggtctcgcaccttccctttcgtcgggcgagacgagacgaacgacggcgagggcgacgagagagggacgctgcggacgacctgcgctggcgcccctccgacccccaccctgtctccaggaccggccatcgtctcgtcccgccagcatgccgcccgccagcctgtcggtgctcgtcgagggcgtcaaagacaaggtcgatgccatcctcgcacacggtcggtccattttgacctggccaagagagccagcagcgagctgacagagggctggctctgttcttccccttcgaccttccaaggcgacaggctgttcgtcgcgctaggagctggaagtctcaacgtctatgcgctcgagccgcgagaaggtgcttccgcctaagcatgttcctctagctatcgcgtgacctaatcggtcctcgctcaacctcgcagatggcgcgccgcccgaggtccggctgcttgaggccaggaaggctctcgttcggagggccgtcgaccagctgggcttcatccggcagatcaatgctctcgtcgtcctcgccggtgcgtctgccctctgcttgaacctctcattcaagcgcctagaattaactcgcagacgcgtgacctgatcgtctggccggccgcacgtcagacacgagcttgacgctgctcgacccactcaccctcaagccgcatgcgacgccgctcccagtgaccaagggcgttctctcgtttgcgattcataattttgtccggcgtccgtcggcagacggtccctcgtcgtcaacggcagctccaggggcaccggagctcgtcacgctgctcgtcgtcgggctcaagcggcgggtcgtgctctactcgtggaccgacggctcggccgcgtcgtcgccgacgcctctcacgctgccgcactcgccgaggtctatcgcagtcctctcggcgacgcgggcgatcgtcagctactcgagcacgcatcaggctctggtcggcctcgacccgctcacgctcgagctgccagagctgccggctgtgcccgattcgaccgacgcagagggatcggctgcgaaggaggacgaagcccgaccagtgggaatgatgagcggcctcgccggcgtcggcggctacatgggtggcctcgtcggcgcaggcaagggcaaggcgaccattctcagggtggccgagggcgaggcgttggtcgtccgagatagtccgtccagactcttgtagacgcttgtctctgattcgtgctgacccgccctacgaccgctcgcccgcccggcagcaacggccgtcttctttgacgctgcaggcgccccatccaggagcaagatgctcagcacgccagtccctctggaagacgtcgagtcgacctcgccatttcttgtctcgctcttgccatcttcgtatggcggatcgtcgctcttgccacacggctcggcgagtgccagcctaccagcccatccggcgatccagatccggtctgctgcgagtctgacgctgctccagacgctgtccttgccgacgctccttccaggctcgacaaccggcccgttgcacgcgcacacgctgcatcacctgacggcctcttctccgccaagctcgcagtcgtctgatacccggccgccactctttgtcgtctcgactccgacggaacggagcgggctcgctgctgagggcgggtccaagatctggtggataacatttcggccggtcggcgagacggtcgacgagctcgtcatggccggcagctacggcgaggccctgacgctcgctcagacggcggacgctcgccagttgcccgaccgcgagtcgaggctcacgctgctgcgggcgctcaacgcactcgcgctgttccgcagcccgcgcgccaaggacaagcagaaggcggtcgaggagtttatcgggctcgaggtcaacccggctcgggtcgtcgcgctgttcggcgacgtcgtgggctgggagcgcctgagtgtcaacgaggagggctgggtggagatgtttggcggtccaaagggggcggcctctggccaggacgacggcgactcggcccaagacgataagggcgagctcggtgcgtctacttgtcgaccggctgcgctggggacgatcgctcgctgacgtgccaattgctgatctcttccctctgcagccaacaccaaggcctcgcttgagtcgctgctgcactacctgtctgaccgacgtcaaaaggtcctcggtgtcctgccgaacctccctccgtcgacgatcgccgcgctggaagcctcgccgccgctctcgtccgttacaaaggaggaactcttctcgatcccgcccgagccgataccggacctcgaggtcgagcaggtctaccggctggcccagattgttgacacggccctcttcaagacgtatctgctgatccgcccgacgctcgtcggaagtctctgccggcttgccaactactgcgaggtcgccgaggtcgagggcgtgctgaaggagcgcaaggtatgcttcccattgcgcatctcgtccgccagcgcttcacgactgactcctcgaactcacgagcagaaatactcggatctgatcgacctctaccggacccgaaagagccaccaaaaggcgctcgattttctgcaagagtaggtcgccccgtctgacgctccggcctccggaggcgaaggctgaatcacacaccccgcgcaggctgagcaaggacgagtcgaatctcgaggacaagctcgagccgagcgtgcgatacttgcacgcgctcggtccggccttcaccgacctcgtgtgcgagacgtcaaagtggatttttcagaccgactttgcctggggcatgaatgtccgtactccaacgttgcccggatgcagccgttgcaggcgctgacccggtggccgctcactggccgctcgcctcagatctttaccgccgatcccgaaacggttgagcccctgcccaagcacaatgtgctccagcacctgtcgacgattggcccgcaggccgaggttacctaccttgagttcctcattgacggtcatggcgacacgatggctgagtgccacgagcggcttgccgagctctacctcgatgcgacgaagcagctggcgaggcagaagagcaagaggcgaggtgcgaagcctgctctttgtacagtcgtccctcacgggggttcgcctcgacctgaccctgcttgtggctactttccgccgtcagacgactttgcgattgcttacgagcgggcacttgtcttccttcggtcatcaacgttctatcgggcaaaccgactgcttcgcttcgtgccagatgatggttcgttgcgacgtcatcagaagactcggtctcgtcggctgatttttgcaatgccacgtcgccgaaacagacctctacgaggcccgcgcgatattactcggccggctaggcaaccacgagaatgcgcttcagatctatgtccagcgcctgcagtcgtatgacaaggccgaggcgtccgtccgccgaaccgcctttgctaccctacccggccgaccttgctgaccctcctcccttccttggctccagatactgctcggcagtacacgagactcagcctgaagcccgcgtcttcctcgtcctcctccgaatctacctcgtcccacgcgagccggcgcagcctggaccggctgcgacactcgccgccgcgcccccgacgctcctcgttgagccggcgcttgcgctcattgcccgacactcgacaaagcttgacccggtcgaagtcattccgctcctcccgccgctgctgacgatggccgacgtcggtgcctttttcaagcggacgctcatcaaggctgcgagcgagcgaagtcaggcacgcgtcgtcgcggaagtcgccaagagtcggaaggagacactcgactggaagctgctccgcctgcaggaccggcgcgtccggattgccgagacgcggctgtgagactctctctctctcactcttcgcttcgtccaacgaccggctgacctggttctttcgctcgacagctgcccacaatgcaagaagcggctcggcaactcggtcatcgctgtccacgctccgcacggcgaggtcacgcacctgcacgtacgtttcctctctgcatcctgatcgtcacggacgcttcacgctggagtcaaagtcgatcctgctgcctgtcgtccttgctgacacgccgacctccactgcacctcagtgcaaggacgcttactcggcgacgctgcgcgagcgggccatccagtccgaggcctttctcgcaagctgagggcaccgcggccttgcgcgtcggcctcccttcggttgcccgcgcccattacgattctcatgcccctgtcacgactccgccgatcaaccgagaggctttcctgcgggtcgtgtcaccggcgacgacccgtctgtcgagccagccaccacggcagacgacaaggccatttcggggccgaaccttctgcggggccctaccctcgcgactccaagagatttgccggacgaagggtggacgacgtgcgcggcctgctggcgatgcgtcgcctccgttgtacgacttcctagccggtgctggatggaaatctgaacaatgcgaacctctgccaaattcgacgtgatgcgacgagaaagagtagtgccctcgtcggctcctgtatgttgccgatcctggcgcgagtcgtcgctcagccgggcctgtttggttcggccaaggcgcgccgcccggaagccggagacgcccagccagcgagcaagcaagggagggaaggagcagcagccgacctctcctctcactctcactttcactctcactgctttcctctccaatctctctccttgaacgctcgtcttctcgcatccggctcgctcgcacccgcctcatcctggccgcccttcgccctcggtcgaactttccgcgaccgagcagagcgagacaggttccgatgccggcctcctggccttcgtcggacgacgaggcaagccgccttgccgcacgcaagctcgccgagacagacctctcgaccgacaccgacagcagcagcagcggtagcagcggtagcagtcgcagtgatgccactaatcacgtcagcaaaagcagaggcggccgcacggtctcaagcaccggccgccgtcgacgcgtgccgccctcgtcgtcgacggtgccagaccggcgggcgccgcgctatggctacgactgggcgaactacaatggtccggccgtcgtcgacctcaagatggttgaggctgcctcgggcgtgtgcgttccctgccttccatccagtgtggcgctcttgacgctcgtgacgccaagggcgccctcccgcaccgcgtctcccgcagcgacccctcgaagctgactcggccaacgcctacactctgtgcacctgttcttcgctccagctactacacgatgccggttaagctcggcgacacgacgtacaacctccagcccgacacaggctcgtcggacctcgtacgtccatcctccttcttgggtcttcccgccgggctctctcccctctaggcttagagcgggccggctgtggggtcgggcaaagggcctgccgatcgacctgcgagactgtcgagctggaggtgctggtgggccgcctttgagcttgcggtgaagggctcagccttacggagcacgcgaccgctgactgctcctgctcgcgccgacagtgggttgccggtaacacttgcaagctcgccgcttgcactaacgtcccgctctacgcgccgacagacagcgaaacggcccatgatgccgtgcgctactcgtccctttaggccttcagcccggattgctgcgcctctctcggcgactgacgctcgatctgttataccctcatctttggcctcgcaggagatgccgttcacgatcgactatgtcgtcggttccgtcagcggcgagatctattgggagcgaatggaggtcggcggccgagttgtgccctaccaggcgatgggtgcgtcggcttgctgccaggtcatctctgtgaaggctttctgaccgcctgtcgtgcccctccagccgccgcgagcagtgtcgaagacgaggacctctttggcggaaagttctcgggcgtcgttggcctctcgttgccgggcaactcgatcgtgtgtcgctctcgctggccgttttcaaatcgaaccggacctgacaagcccctctccttctctgcccgcacagattgacggccagctcgcctcgccatggggtctcggtccgctgaccaacctcgagattacgcccccgccgccaccagacggcgtcgacctcagcaccggcccggacggctggtaccgccgacggcgccggtcggctcgcccactgcgcagcgggaccttaccggcaccaaagcagcagcagctgtcggagcgtgcgctcggcttcacgccgtacatcaccatgtcgctctcgcggccctcggcgccgacggtgccgtcccagatcgggttcgacacccacctttcgaacctgtgtccggccgactgtgttgccgagctagcctttacgaacgtgatcgagtcgccgacgggcgtcccgctgttctggcgggcgccgatccaggggatcgccgtgacggacgcgaccggcaaaaatacgacgcttagcatcggcaagagtgcgatggacggccaggcttggccagtcggcgtcctcgacagcggtgcgatgggcatctactcgggcaaccggaacctgctcaacagcatctacggctcggccggctatggacccggcaaggacggcaactgttcgtcgagcctttcttcgaaactgcattcggatgactgactcggctgctgctgcccctctcctccctctcctcgcacagactacattccctgcacgctcgcgatcaacatcaccgtcatcatgtcgatcggctccttcccgatccacccgctcgacgtcagcaacccgatcagcggcgactcgacgacgtgtctcggcgctttgcagtacatcagcccctcggtcctcgccggcaagggcgacctcatcctcggcgcggccttcatgcgcaacgtctacacggtcctttctggcccggcgtacacgcgctcgggcgcatggaatacgccgcagctgtcgctgctcgccctgacgaacgagcagacggcagccgatgagttttaccgggtccgcgttctcaatcagaacatcccgacctcgtcctctcagacgccggcttccgtgtcgtcggggggcgcggccggggtcgccaccggccccaagacgaatgtcgccatgatcgccggcatcagcgtcgctggcgtcctcgcgctcgtcgtcgccgtctttctcgcccgcttcttcctcgtccgacgcaagatccggcgccaggctggcgacccagtcgcggccggtaagaggtcgtcgccttcgtcgaccggtggttccgcaacgaatggtagcagcatcgcactcgccgaaggctcgggcgccgggcaggcgcatgcggcctacaacagggcccccgactcgcccagcgcctactacggcctcggcaaccggagttcggcgatgacgacgagcgggtcgatcggctcgagcaccatcgccggttcgtccctctacgacaccgaggaggaggagaagggcgcgccggtggttacagccggctggaaagctggcggccggccgcgaccgcccggaccgccccgtcggcaggtgagctcgctcatgggcggcggctacgaggatgtcgacgacctcgaggatggcaaaggcggcctgactggcagctacgcgccttggggcaaggtcgaagacgacgatgacgagagcgtcgacggccggacgtacgacatggcccgcatctcgagctacgacgccgcgacggccgacgtcccgatgctcgccagcggcaacggtggtagtgctgccgccgctgacagccgcgaccgctggatccagtcttcgtcatctaaggcctcaccggcggcagttcgggctgatgaaccgcgcaggtcgaaggcggtctcgcgcgcgcaagccgaggccgaccaggtcgacgtcgaccggctcatgaaggagaagcgcaaccgacgcgactcgcgccgctctgccggcgaaggccggaccgaatcacccgcgtcggtcgatcgcgtctctcaggcatcctcatccaactggaccctctcgtcgacctcgaccgtcctcggcggcagcggctcgcagcactcataccctcctgctgccgccgccggcacccgcgcatcgacctactcgtcgacctcgagcggctccgccccgctcccgtcgccgacggcccaactgcagcagcaggcgacctcgcgggaccggccctcgctcgtcacttacgcctcgaaccggacgccggggacgatcgtcgagtcgccgacggcctcgccgatcgacgccgaccggagcttccaggcgcttatccccagctcgagacgcagcgcgtcgtctccgccgccgatgcagccgacgacggcgactgcctcacctggcggcggcggcggccggctgaagtcgttcctgccgttcgagcgcctgcgcaacggatcgcagcctccaccctagtggacctcttcccttccttccgtctgtctcacactctctcggctttgctctcactcaccgcgctagctctcaaagcactctctccccatggatgctccgctataacgaccacctccccccgtcacggatccctctcgctcgcactctcgaccaccggccctggcgctttctctaccttgctcttgcccgtcgccccatcctgtctctgcaacgtttgatcttgggctcttgcaccaactccctcttgccatcgctcgcctcaggatccacattgtatgatgcccgttcgcaacgctaggaaaggaaaggtggcacccgagcagcacgtctgtaacgcatgataccccggcccccgaccagtcctcactggatgaggatcatccaggcgaggacgaagtagaagagacagagcgggtagacggcgaggatctgccgcgagggctgcactttggcacccttgaggaagttgacgctcgctggtagggagtcaaccggcggacaggtcagtggacaagccagatgggcgggcgttggtacagagacgcaccccagacggcccagccgacagcgaggaacgagacgggtgcccggatgtagattgcgtggaagaagaaggagaggatcgaggcgagtaggagcggggcgagacagtagccgaggacgcagaggctctggaagaaggagctgtcgaccgagagaggaaaggcagggttagtcgagaagcgagatgcgcaaaagggggggggggggaagagggacgaacaccttgccgccgagcagcttggcgttgattgtgacgatcgtgctgccgaccgtgacgagcgagatgaccatcgagaaggcctctatgctctgcgacgccggggcctgtgagcgggacaaggtcagtcgccggacgctaaacgagcagccaggacgacgagacgcacgtcgatggacagcatgatggctagcccgagacagatgacgagcgggccccagaggtcccattcgcgaagcaggtcttcgcgactcgtcgcggccgagccgagcgaggtcgacgaggaccgtagcgggtagaggacctgaagtagcttggcgtaaatcgacttaaggtcgcggagctgggcgggcagggagagcaggtcgcagtcagtccttggaactcatatccaacaaagatgtcagcgcgcacgatcgtctctgacaccggttcatcgagcgtgttctggccggtatagcgctgtgagagcaagggaggcaagagacccatcagctcgagctcagacgcgccgacgtgctaacaacgccctgatctctcctcaccgtctcaatccggaccccgccaatgtttgagcgggtgccgccaccgggcgtgcttccgatccgaccctcgagcgggttgggcgacgcctggcgagctggcgacgtcgacggcccggcctggctgtggttgcccgagggcggggcgagcgagggctgcgtgaaggagagggccgagtcgtcgtcgtcgtcctgaggtcggaatggaagcggtcagcgagaaatgacgctagcccaggcagctatgacttcgctactgacggccgcgatgtacttgggaggggcggccatggtgctgctgctgctgtcgagaggcaagagatgtcgtcggagggtcgcagccgagagacgaagcgcagacgtaaggcgcccgccgtcgctcccgaccaccacatcagtctgaagcaccgtccctccgccctgtccttcctcaaagccagagctcgtctcggagcacagtagaaatcaatccaccccttggaagcttggactcgacaaaagacatcgaggagggacagggcatctccaggccagcgtccgacggcccgcgtcgacctccgccacctaccaccctcgctcgctcgctcgctcgctccgaagcagcacctcgccggcagtctcgccatgttccgccttgcagcccgctcgttcggtccgaacaggccgctcgtagcaagccaacggacgctcatcctgcctccgaggccgagagcagccctccgaccgccagtggcctcgtggtcgccgaccgcgcggcagggcgtccggccgctctcgcagatccaggttcgaagcctcagcttcgggacgttcgggcgtatgctcggccggggtctgagggtgccgctcggaggtgcagctatcggcgcaggcggcgtcagtgctatggcctaccagctcgactgtacgtctggcctctgagcttggtgctgtagcagcatgtgcgcgggccggccagcctctgacgtatgcctccgcgtctcatcccaccttcgcagccttccgcaaccaggcgacgtcggccctcgacaaaattaccgaccaggtctcgagcacagcctcaaccttcttttcgacggcgagcgaacaggccggctcattcggtcagacgttcggcgagggagcggcctcgttcggccagacgtttggcgcgctgtcggactctgcgcgagaggggctcggcgggctcgagcagcgcctcaaggagggctggacgtggttcaccgaaggcgcgcctggctcctccgaggacgcctcgagcggctctgagagtgggcaggagagcggcggcggtccgaccggcggcgaccctggcggcgggccaccggcgacgatcgctgcgctcaccggcgcgctcttgatgtcgacaccggacgaggatgccgacaccaagggtcctccgccggtcagcgcgagcaagagcatgcaggactcgacgctgctcctcctcaccaagaagctcatcgagatccgccaggtcctgctgtcgatcgatcagagcgaggcgctcaagctgccgagcatcgtcgtcattggctcgcagtcgagcggcaagagttctgtccttgaggcgatcgttggccacgagttcctgcccaagtacgtcgtcgctcggctcgcttggctccctttggctacatgcggctgacccgtctcgctcgctcctgcaggggcgacaatatggtcacccggcggccgatcgaactcacgctaatccacacgccgccgacggcctcgcgaccgaacccggttgagtacggcgacttccccgcgctcggcatctcgcacgtcaccgacttcagctcgattcaaaagacgctgaccgatctcaacttgagcgtgccggcctcggtcgccgtctcggacgagccgatcgacctccgcatctattcgcccaacgtccccgacctgacgctcatcgacctcccgggctacatccagctcgcctcgatggaccagccgcccgagctcaaggagaagattgccgagctctgcgcaacgtacatccaggagcccaacattattctagccgtctgcgcggccgacgtcgacctcgccaactcgccggcgctccgcgcgagccgggccgtcgacccgctcggcctgaggacgatcggcgtcgtcacaaagatggacctcgtcccggccgagcagggcgcccagatcctccagggcaaccgctacccgctccatctgggctacgtcggcgtcgtctgcaagccggacccgcagcggccgggccgcggtcgcaacctgacgggggccgttatgcagaaggaggacgccttttttggcggcgaaaactctcgtttcttcaagccgccgaaggccaagccggcgtccagcagcagtagtctgctcggtggcgcagcggcgaaggacgggggcgtgctcgtcggcacgggaacgctccggagcaagctaatgaaggtgctcgagagcagcatggccggcagcctgcacggcatcaccaacgccgtccagcttgagctcgaggcggcgacctaccagttcaaggtccgtagccgccgtgctggctctcgcgattaggctggctccctgatgcacctcctccgcttgcacttccaggtccagtacaacgaccgacgcgtgtcgcccgagtcgtatgtcgcagagacgcttgacacgctcaaggcgacgttccgcgacctctcgacacactttgccaagccgcagatccgcgagaagctcaaggccaagctcgacgagaaggtcctgaacgtgctcgactctctctactgggccgacccgcggacggttgagctcgcggcgctcgccgaggaccgcaagctgaccgaggccgatatcgacccgacgtgggtccacaaactcgagacggccaagtcgctcctgaccaagtcgggcatcggccgcgagtcgacgacgctcgtcgccgatggtctccggctcctgatcgacaagctcgcccagagcgagcccttctcgttccacccgtcggcgagcgagcagattgtccagttttcgcactcgatcctccgcgatcgggtcggcgtgacgtctgaccaggtcgagaactgcatcaagccgtacaagtacgacgtcgacctcgacgaccgcgagtgggagatgggccgcgtcagggccgaggcgctcatggaccgcgagcgcgggctgatggaggctaaactcgccgagatccggaaccgggtcggcggtcggcggacgctcgacggcctcgtcaagtatgtcggtgacgtcgagaaggagaagcgcgagattgccaagcgcaagattgagcgctcgcggaggggcgagcccgaggtcgacgagtcggtcgcaccggctgatccgtaccgctacaatgtcgcccatctgcccgaaggtgtgtctcaggcgcttgtaaaaaaactggcccgaccgactgacattcctctctctgtctctagctcgccacgctctgctcctccaggaccggctgaacatcatcaagctccgtaagcaggcgcttcgctcccgccgctgccgttcggggccggacgagaaggccttctgcccagaggccttcttgaacgccgtcgccgacaagctggcctatacctcgaccatgtttatcagtgcgttcgccgtccgctccagtcagcttctcgcgtgctgactgccctggcagacgtcgagctgctcgaccccttcttctaccagttcccgagcggcatcgacaccggtctccgtccagcgctcatcgttcgtcccaccgcgtgttctagcgcgtcgcgcatgcttcagctgctgacaaccattctttgacttgcagcgcgaccctacctttgcgcgcgaaaacccgacgatcctcgcccacctcgagcttcaggagcgcaaggacaagctggaaaaggtgcgggtctctccctgtcgggctattgctgtgctaacgagactgactcttcgcctctcacttgtcaggtcatggcctcgctccagtcgctttctgagctccggcaagacgctatgccggccgagcagcgcaagcggggcggcttcttcgccaacttgctctgaagtctgaagcaacggcctcgctctcagcaattgctttacctactggcggcccgggcacccggccctgcctcgagggacgtcggctcttctccgcacgtgacgattcgctgtgagcgaaacctcggccccccggcgcatctatctgcccgcgttcgcctcgccacacttctctcctctccgctgcgtgcctggctgaaatccgggctgtctcctcgttgtaccgctcgcacatagttctgtcgcgtcgagaggggaggagcgacttgtagaatgctcggtttgcctcagagggccctcatcatggtcaatgttggccgggcaaagtcgcgcggtctgcttccgtttcgttgccggcggcagtggcaacgcctgccttcttcccagccttcgtccctgccagccagctcccacggcagatctttcaattctttaagaagcgacaacaacgacacttcgactgctgcccggttcgaggtacgtctccgcggcaggcttggacggggcggcggctggcccgcttttgttggcctggcttcggtccgccgccgcttaccgacggcctcaccggggctgatgcactttctcgactgacgtgctgctcccgggccgtcgtcgcctctatcttcagaccgcctctctctcgacgtcctacacgccttctccttcttgagaccggcagcccgcccctgttcttcctcgacgcaccgtcacgtgctcgtcccgcggcctcaagctttgtgtgcttcctgctgtcagcccgccggcgtcacgagccaccgcccgcccacgacccgccgagccggcccgtcgccagccgcctccctccattccttccttcccgtcgacaacaacagcaaagttctccagcacacgagacttcgacaggccatcatagcgagtgtccttccgggcgtccagctgctcggccgctggctctttgccaggcttaaacgcgcctcgctcgttgtcgtcgacccgcttgccggctccctgctcgccgcgatccggacgaccatggccgccctcgctggccctactctgtttgacatggccgacccgaacgaggacagggcgctcgtcccttacgtctcacacctgacggccaaggagcagctcgccgtccggatccacatctacctcctcttctcgcccggtcaggttcgtgtgaaaccagcgcggcttcgacaccggctcccggctgaaaagcaggcggctgaccttctcctcgccttcgccttctttccaggaggacacctggacgctgctcgagcgccagttcccaaaagcgtctgaaaaggagttcaatagcgcgattgccctgctcgagatggaggtcggtcctcgacgacggtgctgctcgcgacgcgcgaactgcgcagcggaacaactgggctgacctaaccgcgttctcctgtcttcgccgcaggacgttgtctcgatcgacccgcacccccactttccgcaagagatgctcgtcaaggtcgacaactcgacagccgcagacccagaggcggcttcagtcccgcttccgttcccaggtgcgtcgccccagagcacaagcgcccgctgccacaacctgcggcttacaccttctccccttccctctcacccaggattccgctaccccgagtttccgacgccgcttggcaccggccgcaactcgggcgcgacctcggcctcgctcacgcggccgcatacaccagcaaagaacgtccagttcctgacaatggccgtcgccgggcccggtccgtcctcggcgaacatgaagaaggcccgatcatcgaccggaggaagtcttggttccaacggaccggcatcgaacggcgtcggcggcggcggagtcgaccctggggctgagccgggcagctgggccggttgggcgctcggcgcctggtcgcatacgccccctcggatgagcgaggccgtcggcgaggaggacgacctcgtcgagagcgtcgacgagacgtcaatcgagtcgcccgcgtcggcagacggccgaggccaagtcgctccggctgttgtcgtcgtcgacgacggtgggaccttcaaggcggctcagcgcgaagggagcgtcggccaagcggcgctccttcggcttgtcggtgacccgcctgcgtgataggtgggccggctttcgctcctctattcgtggcattagacacaccatccgcccacacgctgccatattgctttcagaagccctatccggccgtgcattcgcaggccttccacaacctagacgcgctccctgcccacttgctctccctcacataggggacaccctccgcatgaccaccccacggaccttctcttgcacccaccgccttcactacgcgttcgctcaaaagagcgaagcttcgagcggcccgctgggccctttccaagtctcgcctcttccccctcactttgtatggctctctagctcggcctgcgaccgcctgccctctgctgctctcttgtatcgtgtaatggacttgttgcctctttttcgcctgaagttttctcttgaaggtgagggccaaaggtcgagacaaaggggtccatgcggatccggcagggtacaacagcagagagtctagtcgagcgcacacgggcgcaaaccctggagataagatagtggaagctaggggccgcaggcgagcgtctcaggcaaacgaagacgataggtcagtgactgtgaggcaaaagtcgcgtggacggtcaggagacggagcgaatggaaggggagaagagggtggagaacgcacggtcgacctgcggatggatcatgtacgagatcttgtccgggtcggcgagggcctcggccggcgctttcgcactctcgagcgccgacgacgcgcccatgtcggccatgtcgcctcggatctcgagcaggtactggtcctgcatggcgaagcgatgagatgagggtcagcccccggccaacgcgagtggacgcagacgtcatggccaggcgacgcaccttgacgagcttgttgagcgccttgccaataagctcacgctcgtcctccagctgctcaatcgtctgcaggtcggcctcgcgctgctcgaggtaccagtcgacgaggtcctcacggtcgacgctcgggtggtcggtgcgctcggcctcggcgaggtgcatgacgactaaggacgaggaccagagtcagcgggttggggttaagtgccctgaggcacaaagacgacgcaccgaggttcatgatggccatgtaccggtcgtaggtgatgcgcagcttcttcttcgcaggcggcgcatcaggcacggccggcggtggtgccgctgcgtcattcgcgccacccgagccagccgggccagacgatgaggatgcagccgcaagggacgactcggccgcctcggccgcctcggccgcagcgacctgcgcggcatcgaattcggggtcgtcgacgtccatcgcgttgaaggggttgacgtcggccgcagcctcgtcctcctcctcgtccatgtcaatgtcgtccttctcgacgtggatgatcgactggcggagaagcgagaaggcctcgaggaccatcggcggggtgatttctgtccggcagttggcccgggcaatcgcctccgagagccgaacgagcgactcaagctgccggacggtgatccggtatgagttcttgccaagaccgcccgagtcctcggcccggagctggcggtacttgtcgacgaggacggccgaggcgtcagccgtcaacttcggcttgaacgtccgagcgaagcggatgtagcgctggagggcctcggtgctgaactcggggttgatggcggcgtcgcggaagcggtggacgttgacgatgtggctcgcaatgtgcaggtcgacgtcctcgttgcactcgtcgaggacgacaaagaacaggtcgaatcgcgacatgatcggcgccgacacggcgacgttggcccggagcgacatcttgcggttgtagcgcccgccgaccgggttggccgccgcaaggatcgaggtccgggcgttgagcgtcgcctgaatgcccgccttggcgatcgagatcgtctgctgctccatcgcctcgtgaatcgcaacctggtcgacgatgtccatcttgtcgaactcgtcgatcgcgcaaatgccgttgtcggcgagcatgagggcgcccgcctcaatcgtaaactcgcccgtctcctcgtccttgacgacagcggccgtcagaccagcggctgacgaggccttgccagacgtgtagacggctcgggggaggaagccgcagatgtacctggaggcgggatcagacagtggtcagaggcgggcggcggtgatggcagcagacgaggcgtgaactgacttcaggaactgcgacttggaggtactcgggtcgccgacgatgcagatgttaatgtcgccacgtaggttgatgccctcgctcgtctgcttgtggacgccgcccatgagctggagcaagaggcccttcttgacaatctcgtgcccatagacggtcggcgcgatcgagttaacgagccgggcgtagatttggggcatgttgaccatcgcccggagctcgtcgagctcctcctttgtgagcgaatcgacaaaggcctgctgctcctcgtcaccgtcggtcgcatcgccgcgaatgtttgtcgctgccgactgcgagagcgtgaaggtgaggcgaaggttagcttgacctagatggcccggtcaaatgaacgtctcgactgacccgagtgtcctggtcctgaaccatgcatgccaggaaggccgtcttgtagccgaggtcgcgcacgccgagctccttgaggccgccgacgccctggttggcaaagccctggtcgccccgacttccattggcgttccgctcgcgggccatctcggcgctgacgcccggcatcgacagctgactgacgtccgggacgacgacaaacgtcccagtaaacgtgcacttgtcgccggccttggcccgctcgacaatctcggcccggagaatgacgtcgagcgagcgcggcatcgaaccggtcggaatctcgttcgggttttcctgaatccggaccttctgccaatcagagaacttggactgctcgacattgagcgtccagcctgtccggttcgagcatgtcgggttctggcacatgatcggctgcgggcgggagaggatcgggtcagacagggtgctggagagcggcctcagcaggagacaatcaacgaacctcggtgtacttaaactgctgctcgacgtcgccgacggttgtccggcactcctggcagacaaacgcgccaaagacaagctcgggccggacctcgctcgtccgggtgacagtgcctgagatggccatcagctggccgatgcgcgccgtccggaggtcgcggataccgtcggtgatggcgaggttgaggaaggcgagcgagaactcgcgcgtcaggagaccgggcgtcgccgagccggcggcagaggcttgtgacgaggaggacgcgggcgagaggtagaggtacgtcggctcgtacttgcggatgaggttcgtcagggcccgtcggaggtagggcaggaagctggcaggtcggagtcgagcatgagcatcgagcttcgtgctcgagatcagacaggcgcaggaagatgacgcaccggtagtactggccctggatcgcccgagcgagaacctcctcgcgctccagcaggtgcgaaaagtcgacgtagacggtcgtcatctcgtactctttgagcgtcttgatctgctcgacgtagtagaggctcggatcgccctcagcgcccggctgagggtcggccggcgtcgctgggaaggcaatgtcggttgtgtagctgatcggggcgaagcagcccatcgagcgagggcgacgccgaggagaggagggcaagaggtcagcctgatgtccaggactcgctgaaaccgccgttctgctccagccaaaaaggcagcatcggcgagcggcccgggggagcgatgaacggtggagggacgcacgtctcgaggaacgtctggaacgaggtcatgacggcctcgcccgtcgcgtccgtcacccgagggacgtcctcttggagccggccgactcgcctccgagcgccccgccgagcagccatctcctcgtcgccgctgtcgtcgccgctgtcatcgcctccgtccgcaggcagagggccaccaccgccaggagcggcgccgagcgctagcgggtcgacggtgttgcgcgagccgccagccgcggccgccgctgccggtgcaggccgaatgtcgtcgacgttggcagagggtgacgacgggcgaccgattgaggacgacagcatcatgcgcggagaagagaggccgtccatgctgcgtttgctgtgcggaagggggagattgttgagccagggaaaagggcgcgttgctgtcgcgtcggccggccaaatgagctgcgatgcgtccggccgggctcgacgcatcgccggcaggttgggcgcgcgaagtgcctcaagccggtcgctcgcgccgccggccaatgaggacgagcaggcccctggccctcctgtgctgcctcccgcctccttatagcgagaggggccgaggaagagacagacgctgatccctcactgaccaccgctcccaccgctctcttgaccgaccgaacgaccgacccgctcgccttcactcctcaccaaaacctcttctcaacaccttcctcacgatgtcacacagcggacacggcatgaacatgggcgctggcggcgaagcctatgtcatgaagatgtaggtcgcccggctagcctcgtctgtcgagagctctgcgctgaccccctatggcccttcctccaggtactgtgcgttgcctccctcacaggcaagccgagcgcacggagcgtgacccgctgacccgcccgccgtcctctcccctctagtccacttctcggcgaccgactacatgctcttcctcgactggcttccgacggcgtccaaccactttgccgccgcctgcatcttttgcgtcgcgctcggcatatttgaccggctcgtgcgtcttgccttcttgcgggatctgtgcgtcgatgcgctcgttgacgacgaacacccattccccttactctcagcttgcagccttccgcggagccctcgaggctcgctggcactaccagtgcgtcttttcctgactggaagcggccgcaagttcgctcaaactaaccctccctctcgcttgccgaccgcagacggacacacgacctctccgactcgaccctctccgacaagctctcgttcgacggccgagcgccgacgctgccgaaccggcgagcggccgcctgggctgctccgttctcggtctctgttgacccggtccgggccgtcatgcacggcttccaggccttcatctcgtttgtcctgatgcttgtcgcgatgacgttcaacttttggtgcgctgccgtctctctgtgttcaccagggtcgcaaagtactctactgacgctcgctctcttctccttgcgcaggtatgtcctaagcctgtcggtcggcatcgcgctcgggacgctactcttcggccggtccgtccttcttctccccgtcgctccctccagagcatgactgactccttcgcactctcgttgtcgaacagctatgcggccaacgagagcgcggcatcgcattgctagagaggtcgtcccggccagactgtctgcttccctgtcatgaccccccccccccacctctcagctcttcctgctccttttctcacgctatgccgtcgtgccttccccgggattttccgcgcttgtagatcaaatgtccgtctcttgaaagtcctagcagagcctgcagaggggtatcttgcgagccgggcctttccttggcgagagcagctccagcgtccgctggcagccgcagacacagcctatcttacgagagacagagcgaccggcagatttcgctctcgcaaaatgccctcgtccggactgaaggccggtcgatctggccgagccgtgaaagagctctctctgctaaaaggaaaaagacgcaggccacgcaagaggggctcaaacgccctcagcggtgcgggggcccgcaccgccgggcgaagaaagccctcacgcgcgaggagccaatcgacgccagccgtcccggcccgtcgcccctgtcggtcttccttcgcccggccggagcctggccttcttaagggaagccttctcgctgaccttctccgctgaccccgaacggctgatcctgagcaccgaacgacgaccctccctcgctcgctcgctagcaacctcgctcgtcacccctctcaccctcgcgcccggcaccatgtccatcaaccgcctcgtcgcccgccacagccatgtcgagctgacgccggccgaagccgccgacatcctgcgcgacccctacgacgagatgccaaagtgtcagtcgccctcgttctctgccgtcccctggttcgtaggctaacgctgctgctggacgcggccctcttcagacgcaaaggccgtcgtcggcttcatctgcggcatcatcatcctcgccggcctcagcaacctcttcacgctcgtcctccgtaagaccgcgtacgtccctcgcgtcctgccttgcaaattttctcgagtcctgaccaccttccactgtcctcagctttggcgcccgtatccaccgcggccggctctaccgccgggctgtcgctgcttaccgctggatcgagacatcgcagccaaaggccatcgccggcatgtcgttcccgacttggggaacgatctcactcatcggtatcttctggtcgttcgtcctcagtgcgtctttgctttcacctttctctcgctcttgctcgacccttctctgactgtgcgctcctcccgctttcagtctggtcacttgccgtacagccctactaccgaaatcggtggaacgttggctcgccgccgcttgcccttcgcactgtacgtcgccctggtcttgtcaatccggctgagcccttgttgatcgagacctctggcgcatcaactagggtcttttcgccctcggctgctaccctttcatctttggtccgtcgtttcgcccacctgctcccacttgtcattgtcagctaacccccttacccaccctcgtaacagccttcggcgccaagtggaacattgtcggcttcgtcgtcggcgcctcgcacgagaagctccaggtctaccaccagtggctctcgcacctcttccttatcctctcgctcctccacacgttccctttcgtcgtccagggcttgcgcgaggtccggtgcggtctttcctgcctatgcagagtgacctgatcgccgcagctgactttccgttctgctcatccttgcgctaggcccaacgctgacggcaagaatccgatgggcctgagccaaatcgcctatgcctggtcagtcgaccacaaagtcgtacgtctctgcccgaactctgtcgcaacctcatccgagcagacctgctgacgcccgtctctcatctgcagtactactggtccggcacggcctgcctcgtttgtctcggctggctctgttggggctcgctcagcggccttcgcaagcgatcgtacgagctctttaagcttctccacattgctgccgccatcatcttctcgtgggccttctaccttcattgcaacaaggtgggtggtctgtctttcggctttctctcgagcctggcgctgactctgtcctcgtcgttagctgctcggctcgtgggactggatctgggcgacggccatcatctacctgacgtcggtcttcatgcgcttcggcctcatgtttatccgcaacggccacagcatcccgctcggccacatcgaacgtctcgccgacaacgccgtccgcgtcattgtccgttacccggccggcggcgccttccgctggcaggctggccagcacgtgtttgtcaactttatccgcgtccggcctttcgagtgagtgcctctgacctttcgttgtttgtcgtctcagagtctgaccacctgcccctcccctcagatcgcacccctataccatttcgaacgttgcctacaccgacgcgatcgaccaagtcctgcaaacgacgaccgagcagggcgaccttcaccttgtcttccggatcgaccccaagaaaggcctcggcccgcggctcctccgtctcgccgagtcgaccaacgcatcgacgccggtcctgctcgacggcccgtatggtggcccgtccgaggccaatcgcgaccttggccggcacgacaccgtcgtcttcctcgccggcggcgcgggaatgtcgtttcccatggccatgctcgagtcgctgacggagcggctcctccgcggcgacgcgagtctcaacgtttcgcacatcgttgtcaactgggccgtccgcaacggaggtgcgtcctcacatgcgctcttcactcttttcacgaagagagtcgttgctaacgtgcgctgtcatcctaccttcctttgcagaggccgagacgtggttcactgagcgcgtcgagcgctgtgcgctcgcgctccgcaagctgcagggcttccagcttgacctcaacctctacatcaccgacgacgagagccccggcatcgctcggctgacagactcggcctcgtcgacggcggctgggtctgagaaggagaaggacgaggactcgtcggagaagatgtgagcccttcgagctctcggcgttgcactaggcctttcctgactctccctccctctcccgaccgccctgcaggtccgttatcgggcacggctcacacgccggcttcagagccttccgctaccggccgagcttccccgacctgttgaacgagatgtttgcctcggccgcgcccggctcgacgatcggcatcggctcgtgcgggcccgtcagcctgacgaccgacgtccgccgcgcggtcggcgcctaccagtggcagctcgcgcagggcaacgtcggcgcgacggcaggtgccgctgaggtcgagctcgtcaccgaggtctttggtgcgtcgtctcttggttcttgttgcgacgtcaaaggtctccgctgacgtgccaatcctcgcctctctgacagactggtgagagctgatcgatttcagcatcccttcttatgtaccgctcgtgtgtcttcttggtccctcttacatgcacacctctcattctcgcctctcctcaaaagacgcctggccgaggtcatcggtcaaaagctgcgagtcgcatggaaggtcaaaggtccttgagcggctcgaccgtcgcagtcacgccccagcggccgacggccgcgccgccaaagtcgcggagcttctcgcccggctggcgctcgccggccgtctcccatccgacacccgagtcgtaccagaggaagccgaccgtcggcaggcccgagcgcgaaataagccggaggacgtcttgcgcgagcaggccgccgagaacagccgatgtcggcgagaattggagtgacgagaatcgggcgagatgcctgaggtcaagagccttgggtcagtgactgcacccgcgacccgtgactaaggcgcgaaggacgcactgggtgatgtccgcgacgtctgggattgctgcaagcgagacaccccaagacgtgagcaggttgtcggccgcctgcttcagctctaccggcgcctcggtatcgtcctctgtcggcaaccggccgttgcgcgcctgccagtcccatagcgctgcagggaggtaagtgagcgcgggcatggtcagcactcggtgcgacgagcgaggcatcgacgcgcaggccggtagacgcacccaatagcgaagaaaagccgcccgcgccactccgcctcaggttctgcttcgtcatggtcttgagacccttgtcggccttgaggacgcccgccacgcagggcatgctgaccgtgttctttagccggcctttgacggccggctggcctgggaacggctccgtcttgtcctcggtcacgtaggagaaggacgaaccgagcgacgtgacaatgtagccagtcatggcgtacgtgccggcggcgacgaagagcgtgttggcccgctggcaggcccggtcgatggcgatctgagggtgaagggcgctgtcatcagcacggcaattcgacggctaccctctcaatcggacagcacataccattgtagcacgatccgagtcggtcaggacgagcaccgacacctggtgctcctgcaggtacgcgaccatcgcatcctcggatgacgcgggcaggaaaggcgctgtactcgtcgacggcgtcaccttgacgagcgggttgagcgactgaatctgaggcagcgccgcgtcgaccttctgctccggttcgcaagtgaaagctctctcagcgaagttgttgcctcagttgcctccaggaggcgtcgatcgcaccttctgaccaacgacgccgtcgttctcgcggaacaagaagccggccccgagatcacgctcgtcgacggagctctcgtccatcgcctgcaaaggtgaagctgagacggtcagcacgattcaagctgcaagtgggggcgcggacgaacgatcaagtggccgatgcccgagaggacgatgttcttgatcgtctcgtgcgcgagcgagttgaggttgagcatgagaacggtcgagctccgcatcctgttgaccgtgagccatcggcgcaggctgtcagcgacaagtccgagatgaccagcaagcaggcgagcagcgacggacctctgctgggcctcgaggccccagagccggatctggcggtcgtacaacgcggcctccgctgcgagtaccaagcacgagcgaggcgacgacgcgtcagaacgagggcagcggcggagcggtcagtctcgactgtcccgctctctctacgtcgaggtcggacacaccctccgagatcttgggctcctcttgcggtgctgatgtggccattcttccgctcgacccgtgagatgagagatgtggttcggaagacggggctcacccgcctgtctgcccatcgttgctgcccgtctctgcgcggcgctcagctctgacgagcccaaattcagccctagctgcacctcctcccttaccccgctctttctctctcatagatagatcacggcaggcagcacaggcatagacgccggcctgatcacccaggctaagagactctagacggcctccttcaccgatgggcgccaaactccctccctcgcagttcctcccttcgctcggccggtcgctcgctcgattcaccccgaccgagctctccggccacatagccaagctcgggcagatcttccagccctgtgcgtgctacaaagctctcgactatcagagctgcgctgactgaccgtctgtgtctcgacccacagccgtccacggcgccagcagcgaggaggaggtcgtagactctggctacagcacaccggccgatgccgaccaagcctccgtcgcgaccggaacggcggacgacgacgacagcgaccacgacgagagcgccgacgagtttgagcacaagcacgctcgcggctggctcgagcggatcgtcaaaattggcggcgactggtgtgaagaggcgtcggcgacgggagagcgcgagctccgggagcaggtcgtggaggctgccgccggttcgtccaccgaatgcacatggcgcagggtccgcatctgggcgagtattcgtgctaaccccgctcatttggttgtctcagccttgcttgccgtctggtccggcacttctggtccggctctcccctcgccgaggggctgccgcgcagcagttgagcgcacctggggacgtgcacgctgaccctctgctacctcgctcgtccagctgccggcgccatcctgcgcaagattgctctacctcacgaggtcaacatcatcgtcaatgatgcgccctacttgtcgtcgtcccgtacgtgtggcgtgactcagcgaaggcacgacctctcctcctgaccagtcttctcctctttcactcgcagacgactccgtcggcgtccagacctggggctcgtcgattcttctcgctcggcgcattctcaactttccagactacttcctgccgacgctgaagagtcaaaggccgctccgcatcctcgagctcggggccggtacaggcgtcgtttcgctcgccctcgtgcaaagcccactcgccgtgctcaagggcgcccggatcgacgcgaccgactaccacccggacgttctagcaaacttgtcgtgcgttgtctagagccgccttttctgttcggatgcttgtctcgtgctgatgacacgtcccctttgctgcgagcagcaagaatgccgccctcaacgttcctgctgcagaacccgacacgcctctttcggaaggcacgacacgcttcatctcgccaacctctggtggtacgctcaccgtcaggccgctcgactggctctcatatgtctcatcgggccctcttgtcaccgtcggccgagacggcacgcgcgatcggtcggcctcgccctgcctcctcggcgaggaccgctcaagcgagggccgttgggatgtcttgattgccgccgactgcatctacgagaagcatcatgccggatggatcaaggaggctgtcaaggcgctgctccggctgccagacgccgacgacgagggcggcgtcttccactgcttcatgccgctccgaccgacgcacgtcaaggaggttgagtcggtacagctcgtcttcccgctcgcgagcccgccgccggccgagacgtcgtactttccgcacttcccggccgactcgagcgtctcgctcctgcaatcggagtcgggctcggccacgcggccgtactcgccttgcctgctcgcgccgccaaatcggccgacgcgaaacgctggtgaccgctgggtccttcgcacgctcgagacgcaggacttcaaggcgggcctcgagcgcggcgtcggccggcgggacgagatgggctaccgccggttccggattggctgggttccggtcgtcatcttggcgcccagagcgactgattccagtagctagcccttctcggcacttgtatcttgtaggaacagactaggcaaatggctacgcggggctatagcgagtactgaaatcgtgcgggcgataggccagcgttgctcgtgcgcgagggagaggatcaaagaggcgagagacctggcgtttggccctccaccaccacgaccaccaccgccgccgtctcctgcctcggcatctcggctaccaagcggtcatgcaaagaccggcggcagccagaaatggtcgagatggcgaaagcgctgcgtgctgtcggcccgactcttactgacgcatatcatgatccgtggcaggaggcgcgggagcgcgagctgtagggccagcgagctgagatcatggccgtccgaccttctgtctagcagcgggtcagcgtagactgtcagcggatgaccagcgaccaattcagcattctgcagtggttgaggcgcgagtagcacgatcatgtggatcgcgcggcctccctcacttctctgcgggtcgagtcaagaaggagaagcgatgatcagcgctttcgcttcagcggtagccctcagcgtcgagcgtcactcactgcccgggcccttgaaccactttggcatcttgccgccgcctgccgtggtcggctcggggttgtctgctccagagatcggcgttggcaaggccgtcgctggcggcggcggcggcggcgtgggggtcggcagcggcaactcctctgcgcgctcgagcagctcatcccggaggggcgcccgcgcctcgcttccgttgaaagccgggtctgcgaaacggatagaaaggacagaggacggcgcgaggccgtggtcggccaagctgaccttgaccggctctggcggcgcaaaccgcttcgaggggagcttgctccgcggcggcggcggaggcagcgtctcgggcaagttctgattcggcggaatgtctgacgacgtcaagtgtatcggcaggagtcagcgttgcatctgaggcgacagatgttcgagtcgaatgggctcgcacagagcgtgaacttggcctcgacgtgcgcaggcgcgagcgatgcccgaacgaacgcgtagacgtccttgagcggcgcggtcgacgggaacgcctgctggacgatcgtccggtcggcaaacttgatgcgaatctttgtctgagggcgtccgcaagcagtctgggtcagcccgtacgctcgatgtctgcgaagccctatcgcacgtacctcatcccaccgccgtgccggctgcgtgtcgcgctcgcgcatcttgctcgtccggagcacgctgtcattctttgttcgcttggcaattcctgccaggaccgactgcgcctcgcccggcgtaagatcgtacgctgaatctggcaagtcggctgtccgggtcgaaagaacggtcgcttgtcagcctcgcaagacggtcgggagggcgcaggcgagctcagggagggacgcacgcggcggcgggacggaagctggtgggaggtagacggccggtgccgcagtcgggactgcggccggcgctggatgtgtcgagctcgaggcgacgtgcgaggaagcttctgtcgtcatgctgggctggggatgacacagtggggtcgtagatggtgatggttggggacggaaaggacgcaggctgatgaggtggaggtcgcgtaggccacccgaccttggccgccgacaccgatgacacggcaagatggtctcgctctcgctccctaccctcggctcgctcagcgctctcgtccaggctctcgagaagggccgctcgccacgggcagcgaggctgcaggccgctctcgttgcgttcgaggcagcggcgagagagaacccgaacccggtgccggaatggcgcgtcttgcgcgagcagctgctcctcctcgagcgcaacgacccggccgaggccacggaggtcgccaagctgagagctgcgtgtgatgccgagcttgttggcctcgcctctgagcctgaggccgcgaccgcaggtgtcacgatggtcgtcaacgaccctgagggagccaagctgcttgaggagatcgaggagcagacggaggaccttcacctctcgtcgatagctccgccggccgtcgccgggtccgaggcgggtcgtttggccgaacaaccgccagcagacaacccgccggctccgctgccgtcgctcgacgcgttgccagacgagctcctgccgctgctcctgtcagccgcaagaccgccagcgcggagaggcctctctgactccacgctgctcgtcacgctggcgctctacccgtcgctcgtcctcccgcccggcaagacgcttctctccctcttcgcccgcccatctgcgactgcctcgagcgctggcgccgccgatgagacgccggcccgcaagcgcaaacgtgcgcttgacgaggtcgcgatggactcgctcggcaagcgtgggaagggcatggacggcgtgacgaaggcgctcgggatgacggccgaggagcgcgtcgccgtcatgatgaagtcggcgtactgggatcaggtgcgtcgactgccgttctcgaagacggcttgacgctgatatcctagacgaccgcgctcgcaggccgccgacttgctccttgctgcgccgccgtcgacgcaaccgacactgaagctcgttcagctccagacggacctcactgaagccgcgcaaacgctactacctccttcgacgctcgcaagcctcttccctatcccggacgccgagcccgtcggcgcttgggatcccaaggcgcttgccagtcgtctcgatcagctcgtgcgtacgcgccagaggcactcatctgcgccgaaggactgagttgaccccgcctgttctttcctcaccatcagttgagcgccttgaaggctgtctgcgctccggtaagggacgtcgagattgaccggctccagtcgctcctccgcgggccagcaacgcaaggccccgccccgccggctaacccgggcgagagcactgacgcgccgtcgcccgaagttgtcgcgcgcacacgggccgtcatacgcgtcgtccagggcatcctcgacctgtgcgaggtgatgcgtgtgagtctagacgacggaggaagagcttcacacgcgcgctgacgttctcccccccgacgccaggccgacctcgcgcaggccaagctggcctcgattccgctgtcggccctgccgtcgatcatccgcgggctggcgcaatcccaggagcgggacaatctgctatcgcgctggacgctcaacgagctgcggtcgacctggcgctcttgggccggcgtcgacggcgagggatggacaaagcggctcgcagagagcgtctgctcgccgacgggcatcaccttcgacggcacccctgctggaacgactggcgaatcgactccggccaacccgaaccgcctgccgccgctgcttagcgcttgcgcgccagtcctctggttcgcccagaaccttttccaggcgctgctcatcacgtcgctcctcgtcctgtttgcgcccgcggcctcgcctgatcttccctcgaagatcctcggcttgcttcgggccgacctgctcgccccgccgtctaaggaccacacgcatctatcggacctcgagctgcttctcgttgccggtcgcgacctcgacccagagggacgcaagcagcttcgcggccggattgacaagattctccggtctgaagaccccgtctggacgctgctcgcccagcgactcgccgcggctcttgctctcgctattacaacgactacgaaaggcatgcccgaggcgctgcgtacagggctcattgcgcgaccgacgacgtcgaccggtggcaagcggcgtttcgtcgtcaaagggttcgagggtgcagccctcgaggaggcggtcggcgagttgctgactgtcctggagggggtgagggactgggtagctgagggatggtcggacgtcttgcgagactgatgggcacacagggcgatcttagatggtttgcttcgacgcgtatgccagggtatcttggccccgcatgagagagagccctcgctgctcgtcttcagccggtgcgagctcaacctgcggcgggtgtcagctgcgcagcaggacgagcgtcgacggctccgatcgacttcagcccgtcgcttcctcccggccgaccacgaccccgcttcactcagctggactccaggtcaagtcgcgctgttacatctctcgcaagcagccaacttcgtctgctccccctcttctcaccacccacccaccatctttcctcgactcagcatgctcgtccctctcaccgcccttctcgcgacggtctcatcggccctggcggccgtcaccgagctcgacagctcactgcaccggtgcgtcgatgctcccttcgactgcgcggtcgctcgccacctttgccctttcagccctgccttcctccttcccggcttagacagctcccttgggtcgtccgagcgcatagagctgacctcgagatgcttgcccttcgttaagctcgttctacggccttgcatacgtgagtaaatggcgcacattggaagcgcgagccgtcgagctcggccgctgacctccctccgacctcgccttccccccttcagagccctgatggtgcgcttggctctgcgatcgtcgctcgtgctcgatctagtcgctgaccgttgtcttacacccctgcggctcatcaacaggcgtcatcctgcccgactgtgagtccccgagcccgctgcatcgccatccgacgttgagctccctccgctgactgcgcctgcgctcggatccgaccctcctccttcctgctgtccctaggcggcgcgacccaggctcaaatcactgaggacgtcctcctgctcgcccagcttacgcctcggatccggacttagtgcgtccatcgtcgagcggtcctttgcgctgcggctcgctgacccgcgcactgccgcccttcgtctgtcaccccagcgcggccgattgcgggcaggtcgaggtcccgtctcctacctctgtccagacgcgcctggtcaacctcgactgaagctgacccaaactcctttatccttacgcagtttctcatggaagccatcaatcagacgaacgccgacctgactgtgagtggccggccttctatcgacgtccgctgtgcccttgagttctgatgctgctgcgctcgcgggcaggtttggttcggcgtcttcctcgcggccgacgacacaatcgagacggtctaccagcgccagatggacgtcctgacggcggccatctccaagtacggcacggagcacatcggcggactaactattgggaatgagtacctcttaggagccattggtccaaccggcacgccgacagacgccaacggtgtcgccgcccggacgacgatcctccagtacgtccagaaggcgaaagcgacactggctggcctcaacctcgacaagacgatccctgtcggcacgtcggacgcgggctcggcggcaaccgtcccgctgtgcgccggcgtcgattacttcatggtgcgcctctcctcctcggccccttctccctctcccaccctcctaggcacccatcgcaaaccggactgacatagtgctttttcatctaggggaatattcacagttggttcgcatctgtgccttacgatgatgcagcagcttggacctttaccttttttaaggtgcggtgcatcggctgtcctttgccagttgggtttctcagactgacgaacatcgtctcttcctagaacttcaacgtcgacgtctgcgcgcaggcctccaacaacccgtacgttactcactttacgtcagaccttcattcgcgtcctactgacctgggcgctccgcatcacagccacgtttacatcgccgagaccggctggccgaccgcgagtatggacgccgcgagcgcaacgaacggtgccggctctccggccggagtcgagggcctcaacgtcttcatgaatgagtttgtttgcccagcgaacgccaactcgaccgactagtgcgcccttcctggttttggctcgatcccaggtcacccgctgacataaacgctgcctggcctcctccttcctcctcatcagcttcttgtgcgtacgctgcagtgcctaggcgatggagcgtcacctgctgacccgctgcgctctcattcctcccttcagctttgaattcaaagacggtgaggtctcccacgtcgagagggacgaccccccactctgctaacttgtgaccgacttccccacctcccatagagccttggaaggccatttacggcggtgtggagccgagctggggtctgttcaacaccaaccgtacgctcaaggcgggccttacacttccgacctgcgaggtgacgtcgccgaccggcggtaccgtgtcgcaactcaagttctcggccgcctcgtcgaccggctcgtcgggcagcaccgactcctcgtccggcaacggcagcggcggtggcgattcggccggcttccggactgcgaacggcggcctgacactcgccgccgccggcacgctgctcgctggcggcctggctctctttgcttagacgacactcagcccgcctttcctcttgctctctcgcccgtcctcgcatgccccaattctcgcacggacgtgctcccaaggacgttccaccctctagcacgtttcctgcctcatccgctgcccagcgcagcctcttgcatgtctattctgcttaccaagagaaatctggatcaaagccgaggacaacacgagattaagggggagtacattgggaggattccgaagggacaagagaaggggtgagattgtgcttcctcctagatgctaggtgttggggaggccgccgctgccggacgagcggcccgccgggcgacacagtcgcggccgatcctagggcaaattgaagaggagacggccgagagggggaggtagatctgagcgagcacgagaggagcttttcgtcagcgactcgggatgcgggctgaaaggtggtgtcgagggtgctcaccttgggccgaccgttcgagatggtgatggtgatacgctggctagcgtcgacgccgatcgacgtgcaagcgacgacgtcgacgagtgtcgatccggctgggtacttagtcacgacgttggcgatcgtgtaagatgccgcgcccgtgccacggttattgaggaacgagagcagcggaaacttttcgaggacgagcgtcgagggaatcgaagcttcgttgatgatcgccttggtcatgtagaacgccggggcggccaaggcgctgtaaagtgagttaaaaggtcagcccgagagccctctccagtgcggcgcccgtggacaagacgcacgcggcacgccgaatggcattcatcttcttggcaaactggtaaaaggcagccgtcgtctggaagcgaggtctgtcagccaacgaaacttcatgggcgagcttcgtctgcactcacatcgtagggtgagttgccgagggtccagagtgcctcccgattgtacgggtcgttgccgccgtttgcattctgctcctcgccgtagtaccaaactgacaggaaagcgagagcagcggtcagcaccgtcgcgtcggcgagtgagctaggcctgcgacgaactagggatgccgtccgagacaaagttgaaggcgtaaagattctgaaggagcgaatcgtcggtcgtgatcgagcgcgggcgggggtctgatggtgagagggcgggagaaggtcaggcaacgaggctcccgacggcgcgggccgcttcgcccgacaacactgactgtcgtggttcgagatgaaggagccgagaacgctcgagtccttgaagaggctgttgaccgagttgatcatgtccttgaggtcccagataaagctcgtcttcgacgtgaaggcccgtctggttcagagaagagcagagctgtcagataaagagccaaacaggtcccgagaacggctgggtcgaacctttgaggaaagtaggagggatagttgagcgtcgacggcatgtagttttgatagttagcgacgtagccaacatctggacgcccaggtgaagagcggaagaagcgtcagccgccagtcgcgtctcagtttcgagacgccaacacatgacgcacatccgctgaagatctcgcccatcgcaaaggtattggcggcggcgatgtaaggcgggtagaaggacgtctcgacgtggccggcggcgtcgatgcggaggccgtcgatggcatacgtctcgacgaggtccttgacgtgcgcctggagcgtcgaccggacgtaggggtcctcggtcttgaggtcggccaactccatcgaggatgggtacgagatccagcctgcaaagcagggtggagagaatgtcagcgagcggcttgagccaaaggctcgtgcagtcaaactggagcgccttggccgtaacgcacactgctcgatgctcgtctggctagccgtgttgatggcgcaggctgagtgatagtacgagagcgagccaaagggcccgtagaggccctggttcgtctggctgggcgggttgccgatcgtcgggtcaaacttggaggtcgccacggggagcgggaaagcgacgtcgttgacgatgatgtcgaccattagcgccatgccgcgtgcatggagcgccgacgagagggccgtcagggaggcaggcgagtcggaaaggccgagcaggtctgaagagaaaaggcgcgaaggacgacggttagccgtggcgttttctcgagtgcgcagcagggcccgtgtgaacaagcccagggcgacaaggtttgtgcgacgcgagcgagctcgagggcaagagacgcactcgtcggccagtaggagtggtaggcttggccggcagccgaggcgttggtgacctgctgtgagataggcgaaatccagacagcgtcaaagcccatgccctgaatgtagtcgagcttgttgactgcggagaggcagagggcggcgaggttagcttgcgcaccagactgctcggtcgacggcccgacgtactgatgccaccccaggagccgccacaatagacgagctcgctcgtcacgcagcgtgggttggtgccgttggcggtcgcgaagcgatccgtcacgacctggatcgggggagccggcgataacacacggcgggtcagccgaatggccctctccgagatcaggaagcatccaaaggcaaaaagggcgagtaaagcagagcggagcgtctctcggcgtcggggcccgtactaccggttctgctcggagacctgtcgtgcttccaccaggccgggtggatggccggctcggtcgcccagccgatgggactttgaacgtcaccgacagtttccccctttctcccccgagttcgaacggggcgcacctggtagatcgaccgcgaccgccactgggcagcagtcagggcctcgacgcccgaaaagacgaagagcgagcagacgatgagccgggcgaggaacgttgaggtgggcgacatgaggcgctagggtcgaggaggttgagcgaacaagggctgagtcgcgcagcggtggaggaggcgagggaaagtgggtggccgttggaggagagagactgcctgcgagcgatgatgcgtgccgggacctgcctggcagtggctgagggcaaaaacgagtgtcggtggagtctgaaggagaggaggacgatgtctgaccggagggctgggaggacgaccgtcgggcgcggcgcggcggaaagggggagctcggcctacgcgcccgtcgttgttttgggtcagacagatcggcggccggcagcgggaacgaaccttcgatcgtcggtccgcgctcagtaagggagcaggcctctgacaggaggctatgggtcgctgttgagctgccaaaaggcagaggagagtcgagtcgggccgtggacgaggggagcctttcgtgcgaccaggcgcaaaaacgaaatttgagtgcggcgagaatcgaactcgcgtcctcagaatggaaatctgagataatgaaccattatacgacacacccggcgggaaggaagatcgcaaattgagtgtaggctctgagtataatcagatcgttcacagccctgtgaacagagcgagatgtccggaggccagaccctgcgcccgtcctgctcgtctgaggatcagccgcgagtaaagacgaggcaaaggacgcatgcgctcgaagcgcccggtgccgaagctcgtcggcgttgaccggcggcgtgtcgtgcgaactcgctccgctttcgcctcgacctcgttcgtcgctctcacccgacgccgacccctctcccagctcttgtcggaatctaggctcagaggctgccgcataccctcgccgcttcatcgacttgcaggcctccggtcgacgctctgactgtcctcgacagcccggcccagacggagcacctcgccgacgactgccctcccctgaccgctccggtccccggttcggttcgcctcgcgtgggctgaagcaagtacgtctctgtcgccgccatcggcctggtttcatgcaagacgcgcatctctgctgaagctccggccggacagctatggcctcagagacgacgccactactgctggccccggagccgacgcccgcagcggtcgcgcttccgaccggcttcttcaacgccaagcgaagggtcctctttacgtccttcatcctaagcttagccttcaggtaagttgactctgcctcggtagagggaagttttgagccgtcagctgactcttcatccccttgtgcttgcccgcaccgtcgtctccagcttcacgcagacgccgctgctctactcggtccgcgtcatgggttgcaagacgtggtgggaggagcatcccgactatgactgggacggcgtcggcgatcgctgcagcatcgaaccgatcctcagcctgacggctcgcaagtgagtgagagtcgccttgccggtcgttcctcttgcgtagccggctgacccggtcgagtgcttcgatcagcgccgccctcatgtcctccatcacgacgagcgcgacgatcgccaatctctttcttactggctggcttatccggcgcttcggagtccaggcggccatgagccagcagacgttctgggcagcgctgcgaaattgtacccagctctatgcccgtacgtcgttggcgcctctgagagctgcgtgatccctgctgacgttgcttttgcgcctctctccagtgacgctcggtggtcagccgggaatcaacattatccagacgacgcagttgttcaatgtcttcggcggcgccggcggctaccttctggtcgcgaacgcgtacatcagcgacatcgtcgaggctgagcagcgcacggcctcgttcggccagctgcaaggattcgtgatgcgtgcgtctttcgataagttgcagacaatcttgactcggccgctgacatcctcttttgatcctcgtcatcagtcgctcgagccgttggcttcacgggtcagtaagcgcgccgggcgcccccttcttgtcgactcgaaagctgacttcaagacattctccaggcggaggcatcatcgccgacacattccgcccgatcaacactttccaagtcacgcttggcctgctcatcttctcgactctcttctcttccttcttcctcccatacatcccgccaccgcccgctgcgacaggcgacagcaagcgcagtggctggctctcgttcctcaacagctttaaggttttccttccgcgcaaggtcgatggccaccggcgatggagtctctttgccctcggtatcggtgaatttctggcagtgctcaggtccgtcttcgtctcccttctcagctggcagccgatccttgatgccaccgctatccgcagcaccggcttcgtgccgacgatgctccagctcgtagccctcaacatcttcgactttcgcagcaccgacctcggctttctcatgtcggcgacttttgccgtcagggcgctcttcctcaccacgctcttcccggtcatcatctcgttgggccgacgctggcttacgcccaaacgagcgccgccggccgtctcgtcatcctcatcctcggtcagcggggtcagcggtctcgccaagcacccaattctggccgcttacgagccgcatccagaggaggacggtcccgaggaccacccttgggtcgccccggtcaatgttcttcatggctcgaccttcgacctccgcttcttaaagtcgtcgctcctcctcgacggcctcctgacgggctgctgcttcttcttcaccaagagctggcacgtctaccttggtgcgtctttcggctcgagactagactaccgggggctgctgatgcgtccacgctctctctctctctatctcagcggcggtcatcatcccactcgcttccgggacgtccccggcgtccaagggcgtcatcctcgagctctgccgaccagaggagcggagcgatgccatcgcctccattgctttgttagaaaggctcggcaccattgccggcatcggtctcttcggcaacctcgtcagtcacgagtcaactgctcgagaggctcacgtcgcctgattggtggctcgcttccccctttcccagttcgccatcctcagcgaggcgggccacccgaccttggtcttcccattcgacgccgtgcgtctacagagcaagttgtcccgtcgaccagaaagcaagctgaggaaacgtctctgacgcatgtagggcacggcgatgcttggcgcgctcgtcctcctctttgtgcgcctgcccagggtcgggctaccatcgtgatgttgcgacacaagacgatgcctttcacaatgtcaggatctcaacgttgtgataggacgcatgtcatcgtcgcacggcaaggggaggggcaggagcgtaagcggcaggcaaaggtctacacgcgcaacaagacggagcggtcgactggaccgcgcagttctgacgagagggcaggtccgggtgggcagtagtggccggggcacatgcttcggaaagaaatctgcacaggaggggcaacgggtcaggcaagagagcgcgggcgtacgaagccagaagccgacgacgaatgctagcggtgtcgacgcacctgttcgaagtccccctcggcctactcgtcgtcgccgggcgtaaacttgtgcttcttgcgcgtgccataatcggtcgtaccacgtcctgagccgacgacgccgactacgcagagagcagagcgacaatcagcaggcgcagagcgggccgacgatggcgcaggcgagggacgagcttacctttgctgttgacggcatcgggcgtcttgaacatgctttcggtcttgacgccgacgaggcccttcttggtggccttcttggcaaacgtctgccagccctgctgcttggcgacctgcacctggttcttgccgtccttgatctccttccacttctcgctcttgaccttcttcttctccttctcgcgctcttcagccgacttttcggctttgcgcttctggctctcagccatcagccgaagggacgacagggggaccgtcgacggcggcgaggaagcgtactcgaggtaggagacagtgtaaaccgggttggccgccggcccggtctgcgagacgatcttggcggcatagaagcggccgtccgtgtactttgccatcacctggtcgcccggcttgtacttggaggcgtcggtcgtcaaacctgccgccgccgttgaaggcgcctcgcctgcccgagcagccgcactaggcgaggctgacccctcgggcgtggcacgagctgctggcggaggtggcagccgggctgctgctgctggagccgcctttggcttcgacggaccggccgaggcagagagagcaatggcctgcttcgtcagatcaatgagctccttgagctccgactgcagcgatgcgagctcagcgttcgaaggatcggcaccgagggcgacctcgacctgagcgagcctgcgagtgatgcgcgcgacggagggaaggggcgagccggaggagccgtcagcggacgagcccctggccacctggcgaaagaggagtacgtactggtgctcatactgctcgagttcctgctggtccataggtagcgtatttcgagagacttagtaggagagagagggggactggaggctggatggagaggaaggcggcggcaggcgtggtgctggttggcggtcgacgagcacggcgaggcggggcaacctcgagagccctgacgcatgccctacctgaccgacgtcgctctctgatcgactgcacgaccatttctgatgccaactgcctgtcgacgcccgttacccgacagcgagcccgggagtcgttcggtaaacccagattaaaatcgtcgcagcggccacgcccccagatccggcgtcggccggctgccaatacaacgtccggccctgtctccttcccgaaccggctcctccccttacctgagcacctgcgagcgactattcgtcgagaagggccttgtaggcctcctccgagagaaggtcgtcgtactcggccgggttggtgagctggagcttgaacagccagcctgtcggaggaaggggcaggacagtcggggccggaggcggacaagatgagacgagacagacgtcagtccacttgcgcacggaggttccaggtcggcccgacagcgaaagggcggcgcaccgttctcgagcggcgacttgttgagcaggctcggctggtcgtcgagcttctcgttgatggcgtagacttcgcccgacagcggggcgtaaatctccgaggcggccttgactgactcaatcgagccgcactcgtctgcgggcaagcgcgtgaagggaggtgtgacggtcagtctcggtctagcgaagagcagctcgtcgacaggtcccggacaacgcccgcctccatctcgcccgagctcattccgccccgcgatccgctcaacgaagcgaagcagacgcaccagccgaagcgatgacggtgccgacctcgggcagctcgacaaagacgacgtcgccgagcgccttctgggcgtagtcggtgatgccaatggtcgcgacgttggtcgccgggtcgacggttgcccactcgtggtccgacgtgtacttgtaggctgtcggaagggaccgggcggcaggcgagcgacgaggcggaacaaaaagggaagcgaaggcgaccgagtggacgcgaaagatcacaagcaccgagcgcgttgatttgatggggcgagattggacgagccaagggaagggggaggcgaagggcatcagcgttcgtccttcgagatggctcggcagcgagtagctcccgacatggcaggtagccagccgcaaggacgtccacccccgttcggcagccagcggcggccatgatggcgggactgactcagggaccgcctgctgatggcggcgaaggcgggcacgaagcgggcctgggggatcgcccgaggcagggcgcggaaggcagggcggagggcggcggcgaacatcctttgaggcgaggactggcaagaggacaaggaagggactggaggagctggtggttgacggaagggaaggtcgggcgggtcaggtcaggctggaaaagcacccctcgagaagacggcaccgagagtcggctcgtccgacgcggtctcttcctgctcgtcgagcgcgcgagacgacgagctcggtctcctgccctcctcgtgggcctcgcaccgatatcagaagggagtgctagtaaggcttcaaagtattcgcttcctcgcctcggaacaactgtcgaagttgttcgggaggccatcttgcgcagggcagctgtcaagctcgagtgctgcgcctcggctggcggcggcctcgtccgtgctggtgctgctgagcaggccggcggtgctcatgaccggtttgtcctgctcattgcctacatctcacaagagacggcggagggcgacctctcgagcgaggagcatctactggcgtatctgaaagttgaggcaagtcgaggcaggctctgtcgctggacctacactcggccgtgccagcgacgcgagcccgcccgtctccgtcgcctttgaccttcacttggcatcagcgacgatctccgcccgaccagcaaaccctcctttctcttggacgagtgcgcctcgcgctcaactctcagcatggccagcccctcggtctcgtcgtcatcgcggctcgtctcgaagctctgtgtccacggccgcgtacccgccgcttcctcgaccggcacgacgcgctcagacgcagcgaccggagcagcgctaggacccgacgacggcggcgtccggatcgacctcctctgcaaggtcaacatcccgctcgtcggcggcagtcagagctatccgctcttcccaggtacgtgtcgttatgcattgagacgtctcgttggtcgaactgacgccctctcttcactcgtctcgctagatcgacgcgtgcggctgctctcgtcctcgacctacccactctcgcagcacgcctcgctcgtcctaacgccgccgccgccggcatcgatcctcgaagccgctcgtcacctccggatcggcacgacgtttgaccggccgtcggcgacctcctcgtcgacaggacctaccacacgcgcgcagcccgtcgtcaaggtcgccgtgcaagactttgccatctgtctccttgccgaaggcggcggcagcagtagcagctccgaggctggccacaaagctcgaggcaagtcagacgccttcagcccgacgcctcagggcgtaggcagcgacgtcgctgccgagagcgcaccgtggatcgtcgtcctcgagctcttcgtgccctggctctcggtgcctccactcgaccgcacggcggtgcgttccaaccaccccgttcgcgcatacatcgctcgctgacagaaattggccgcctctagatcatcattcctctgccgcgctgtctctccaatacgctctcgctccacctgctcctcccgccgcaagactctgacgccgccgaggccgaggaatactcgttcatgacgtcgcccaagctcctgtcgagcggcacagcctccttggaggagcaagacgcatcgccggacgatctcgttcttgccggcacgtttcagagcacgccgcagctcgagatccgctggcgaccagcgctacaaggctcgaccgagggcgcgacgatcccaagccaggcactcctgcgcgagcttcgacagtcggtcgaatggactatcggttcagcagagacagagcctgtccgcaatggatcctcggccgaaaaggtcgttctcggcctcaaggctcagttcgagggcgacctccactacgccggcgttgagtcggtcgcctacatcgatgcagaactctcctttcctgcgtccgcgccgcagccgattgagtggcttagtccgcctgtcttcaaggcagaccgcgcactggcctcctttcagccggcgacaccgccctcgttcgagtctgccgcgccagtcgacgtcgacgcaagcttcgacacgtcgatctcgaccgtccagtcgccctcgccaactcaggctcggacaaagcccctttcgcagcagtcgtcgctcagctcgttctcccggacgacctctggcgggtcgagcagccagtcgtcctcgctcccatcgctcctccgtcaacagctgccctcggctcacctcccgccggcggcagatctgaccgtggtcgacatctcgttcgcggcatttgacagctcgacgcagacggcttcgcctggcgcgagcccgggcctcagacaccggtcgccggtcggtcagtcgacgtcgagcacggcaagcggcagcggccggcggcggaagggcgccagcgagagtgaggctcggacgagcccggcctggcggatcggcgtcgaggtcagcaaagtccacgagattgaaggccggtggcgtgttgagtggactggagagctgcgagtgcctgtcgaagagagcggtcgggtcgtgctcccctcgattggcctccgtcaggaggacgattcggctgaggctagccaggtcagcatcaaggccccgggcggctgggacgtcatccctcctatgaacgcctctcgaagtggccactcgtcgtccaagctcaagacctggaccgtctcgccttcgccggagacgggcgaccaagcctcgtcgcactttgtcctcaaccgaccctcgtcgctgccaccagcggacactagtcctagagatgtcggtgccggatcggcatctcctcgacggacgatccctctgacgatgcggcaccggcgacgagcctcgtcgctcgtctcgaccttttcgcccctgccggtcggacctgtggcgggtccctctagtttcgcgcctgtccccgactcactgttctgggactcgtcggccgagagcttgccgcaggttgtcgtcgagacgctcctccttcccttgcaggagtcggtccagcaagtaacgcgcatgacgatcggcctcccgctccctctgcccagcccaggtgagctcggggaggacgacacgttcgagtttggcatcgtcgcgtctcttgccgagtcaggtccgctgctcgtcgtcccgccgacggtccagatcctatcggcaacactcaactcgctgcccgtcgaatgggatcttcagctaccgagcggcggcgacgaagagccagcgatcccaggcgccctcggctatgtccaactgcgtgcgaccggcctacgtgccatcggtggcgaggtctgcgtccgcttcgtcgtcgatcacccgaggccgcagcgcaagccccggtggggcgactggagaggcaaggagcgcgagcaggccctcgtcgttggcctgccgagcttcgaagagagcgtcgcctggcttgacacccggatcgagacggtcgaaggtgcggtctgtctccggagctctggcctcgacgactcggctgacttttgcttccgcaggcatgaccgtcgacctcgctgcatctacctcagcgctcgagcccctctcgcggtcgacgctggctagtccgcttcgtctcgtcggccactcactggcgtccctcgccacgcccgtcctctcggttgcgctgcgcccgactcggcccccactcccggcccgctcctcgtcactttcatgggcggctttggcgagcttgctcctcctcttttggctgctggccagcgtcgggatcgaggtgcgggaagtgaaggatcgactcgcctgtctcggcctgagcgtgcgccagcttgcagaggaacgggcgccggcaacgacggctggcacgacgacacgctgggccgacccgatgcgcgacacgccgacgaccgcttcgtcttttacagatccagtcacgccctcatcgagctccggcgaaggggatggtctgacgtcggccgagccagaggccggtggaacactcgcgtcctcgtcgtccatcctgcggccgaccttcacctcgatcctccccccaccgcctcaaccgactctaccaccggtcttgctcaacgccgagtccgaagctctgggccggccgctctcgttctactttccagtagagctggtcaacatcctcggccgcgcagacgatgtgctcgagtcgaccgcggtcggccgcggcctgcggagcgtcctcgccggcctcggccgcgccatcgcctgggtcgtctttggctgagtgatgccatgcccgaccgatctctctatgcttgtactctctctccaggcgcttccgctgctgaccgggcgcgtaagtgctgctcgctcggcgaaaagtaggcacgagtccgagtgctgcgcggacgaaagggcggtcgcaggaggaagcgcgacggcccccatcctccctctgcccttcctttgaccactatcccgctctgacctcccgatcctcaacggcagcacctcgccaacatgagctcaggctggcagggggcctctggcgaagcagaccaaaaccccttcaatgagcttccacccgcgctccaaggcatcgcggtccgtcctaggttctcaacaggagggtgtcgagccgggctcacctccccagctcgcgccgcagctcgagctcctcagctgaccccgctgcctactccctccgatcttaggagctcatcttgagcctcggcctcatgtcgagcccgagggtcgaccagtgcttccaggtcaacatcgacaagcgcgactacgagaccccgtcgtcttgatcaactaccccgacatggtcctcgaggaagacatcctctagcccttgccttacggccagactatcgccaagctcgagaagatactcgaggatgaccggaagctgccgcccgagaagccgaggtgcgagcgttgccatcgccctgctgcgcaccgaccgcctgtcgacagctcgtgcgactagcgtctgacttcctgtccaccctacatcctctttctgcagcaagcgtcagtacttatctccccgctcaaccctacgagctgcttgctgactcctcagggtttgcacctacaatcatagtctcctatgccgcgacgcttattgaggctgccaagagcgaggccgatcgtctcgccggcaaaacaacgatcacgtactctgggcctgacaaacacttctgaacgctccgatcgctgagctgaagcgtatcgagctctcgagcatgtcgtaccggaagaaacacctctctcgttgcctcctcgaagcgcatgcgcgtccgaccgtagactgaccttgtcgttccgcagggccgttacctcctccttcgcgtcctttcgaagccggtgcgcgtcactgcgagcgttgtcgtcgtgtaagtccactcgttctgccgcgctcgtacttgatgtgcgtacggttgacgaatagcagtcggctctctgcctctccagcgaggacccgtcgggcaatgccatccaggtccatctttttttgcccgccgtggtcactcgtcccggccggctccgagctcgcagcgacggttcctgtcgaccgcgtcatgatcgtcaaggagctcttcatgaagcagagtaacgatggccgaccgatgctgcgcgatccccgtgcgacgcaagcgccctcgaacgctgagtctccttctcctgtcccagcagatccgggtccactcgccgaccgacatctactttcccgaagagcaacgcgacctcaagggcctcagctggaagaactcatctctagctgccgacgcgaacgaggaggagcgcggcacctctccggccacgaaccagaccgtcggcaacgcccatctcgccaagggctagcttctcgcagccccgcgcgagtactcaggtacgacttcacctcgacttctcgatgggaagggccgcgctcctgtctttctgaaccgcgactctctcaaacatccaaacatcagagggcctccgcgttgagcccgcccacgtcaccctccgtctcaaccggtcgcacgtccgcctcaagctcggcctcttccgcggcgccctgggcagacgccgatgctgtcctctcgcgtgataggtcgaccctcgggccaaaccagaacgccagagcgctgttccgctccgcctcggctctctacgcgcttcagctctggccagaggccaaggcacgcttcgaggagctggcagcgctcgacttggtggagggcagaaagagcgtgcaacgcacgatccagcgctttcgagaggcttcgaacggccactctgacttcatggctctctacgagcagtctcagacgaccgaccggctggacgcggccgactacgtctcgccgtcaatcgccgtcgccgagaccgactcgatgcgaggacgtggtctcgtcacgcccaaggccgttaaggctggcgagctcctgttcctgagccggccaattgcggacgtttacgaggacgaagtccgcaccgacaagaacgttctctccatgaacctttccatcaagacttcagaaatgtccggcttggctcagctgacgcaggccctgctgctgaagtaagtcatcgacgcccttccctcggacctgctcggtcgctgacccttccttcctcgtgctctcgttccaggatctgcggagacccctcggtcatggcgcacctccagctcctctaccgtggcccgggcgaggagtttccggccgcgttcgcaacgtttgccataaagccgacggctgaggtcgccgagtcggtcagccccatcgacgtttcgttcatcaaccgcgtccgcatctaaggcgccgccgcgccacaccggctgagctccgggacgtatggcgacattgacaagagggaggaaggcggtgacaattcgccctcagcgctccacctcctcttcagcctcatcaagcacgcctgcctcccaaactggtacgtctgcgcaatcactgaactgcgctgatttttcctggctcactcagcacttcgctcgccatcggcaacctcatcttcgtgcggccaaagtgcgacctgccggccggaaccgaaagtgcgttctcgtctcgtcctcccgcgggcgggctcgaccggcaagctgatcaaacaccgaccctcagtcaccatcagcgccacggccggcatggactacgcggcccggcgctactaccacatcgtacacgggatggacgcctgcgactgcctcttttgcatggcgagctcgacacgatagcaacgaaagccgtccgcatgtgctcctataggtggcggagacgtcggctaattaaaggggcgagtcgtttcgatcagcgcgaggaagaagggcagcgaagcgaaacgtacgtactatggcggtaggagcccgtcggccgcaggcgcgccttgtaggtgtcgaccgcctcctcctcgccctccccgtcaaccgacatgcccgactcatcgccagccgccgcccctccgccctcgggcgctccttcgttctctgggtcaagctcgtcgagggccggatcgtactcgaggtcgctctaggttgtgccgagcggcggctcgaggtcggggcgctcctctcgcagccgagtgatggcgtcgcggagctccatccggccgagtttgctgactggcggcgacgtttcgttgacgtcgccgtaaaagagggaagtcttgtctggtgagtcgcgacgggcggcatcttgcgttgggcaggcgggaggagagcgatggtcgtcgggcggccgggagcgtcgagtcgagccgcccgctagcttgtacgtttgaggtccctttcccaggctagcacgagcaacagcctcgccgtgccggccgtgccgggcagcgttgagagcgagaaactgcaggctggcctctggttctcacccccgacccagcttgacgctcccaccccctttaagaccaccctcctcaagatggtgcctcgcacagtcgacaacgacagcccgtcccccagtagccgctcggccctctgcagagccaggcacagtcggttcgtccaggctcgtcaaccggagcacgagcctcgcaggcggtcgagcccatcgctgacgccgccgacgcccctcccgctgctcctcgctccctgatcgcagcgtctcatgcccttgctcacgctcatcagggtggctcgtcctccgcatacacgctcgctccgcctcggccagtcagaccgtcgatgcgccggccgaggtcgccggcaactggctcggcttcgcctctgccattgcagcgccgcacgagccgcccaagtcagtccgcgctctcccagcctttcggcctccccctgtcggccttctcgctgacctgccccctcttctaagcgttgcagacgctggcaaaacagacgtctacgccaagaagggtccggccagcctcctcctcaacctggcatgcgtccttgcaccccctgggagcgcggcgctgaccttcgtctgctgtctcctgtcgtgcagtcgactacggcctctccgacgacgacggcgacgacgaggacgatgcctcttaccccaagggcaacgactacgctttggagggcgacgacgatgtcagcggctacggcactcctcatgcggccttccgctcaggcggctttagcaagacctcggccggccgtacccgcaggtcgaaggtcctcgccagctccagcgacagcgaagacgacgccggcacctcttttgccgtcgcccgcaaggtcggacgtacccccgggcccggctcatcatcggccggcccgtctcgcctgccgaaagcctgcgaccctgtcttcaagccgaaggctaaaggagcggccggcaaacgaaaggccgccgacctcgacagcagcggcgacgatccgagcgacgacgacgacgccggatctgacgccggcggcggcaccaacgattggaactcggacatcggcgacgatccgactctcgaggccaagctcaaggctgcggcgaccctcgaggacctctttgaggacgaaggccgcatcgtcacggtcaccattcgggtggcccccttcctccagctgaagcagtcgccgccaggcgctcggtcgctggaggtcgcgaccgagcaccgcatcctcctcaagatgggctggtgggaggctgatgccaacggcaagcccaagacgcgccctcccgtcaagtagagcgcgctcaggccggtcgtctctatcgaagaaacggtcgtcgagggcgacttcattgtccatcggctcgtgcgcctcaagaccggccgctactcctgcgtctgcaagaagcaccggcgccacaagccgaagggacgtcccgtcaagtacaagaacgacgccgtgcgtttcctctgaagcatcggccttctcttggatcgtcctgaccctttcacgccctgcagatggagcacgccatcttccggctctgcgagttccggtgctcccacgagctctggcggccgctcgccacttacgttcgtcctcttttcatttcctctctctcacattatcgagctaagacatcctcacctgcacagcacaagcacaaagagatttgctctctgcgcaccgaccagctgctcaagcgggtttacaaggccttcgaggccggcgtgaacgtacgtgcgctctctcgcatccaatccatgcgcgtctgctgaccgtctcccttgtccctcctgccctgctggcatcgaagccctacgacccgaccttcgaggtccatgacgccgcctactccagcttcatcaaggcgggccggacgcactcgaagtcggagtcgacgaaggccacggtcgcgaagcacaagaagaaggacacctccagagacgtgcaccacaacagtgatcgccggcagtaatgcgcgctctcctccccagtcccgcctactagccagagccgggactactggtactcgccgcccggcggacggcagaccggcggctcccttacaggacagcgaccgtcggcgtcacgggcaagctccgtcaacgcggcaggtcggcctgagaaccttcggcacgagctctggtggcagtacttctacttggcggtcagcctctttgcatctggcgctagcgccacagcttcgcgtcaaaggctgatactcgggctcgcttacttcaggagggctgctacgtcctctccctcaagctggacacgccttccagcgcggcgggtgggtcaagcgctcaattgagctggccgccactgcactcacgagagcatcatctcgacgctgctcctcatggccgttgcggtcagggcgatcatcaccggctacgccaaagctgagggcggcctcgcctcggtccacgctctcttttctccatgggaaccgcccggccgcggtacatcgttccagcgactgctccagacggcagagcgtcgaccggatcaccgccggcggagggcgcgccctcttcttccaccgtttccgcgaggagctcgaggttctcgacatcattctggtgaatatctctgagccttctttcctcgatgatggcttggatcgctgacgttgaggccatgtcgatcctcagcctacttcctttgagctggacgacatcatgcgcgaccggcgctctctctcggccgctcgccagtcacccacccacttagcccttctgagatgacctttggcgacgtctacatcgattcgcgctctgagtgcctggcagctgcaaggctttttgacgtgactcctcgagccgcttcttctcagtcgcaagtgccggcagcaggaggccgtacgcatccgtgagcagcaacggccgcgacgcccatggacccgcctggctctcccttcgctctctctcactcgtctaccatcgctcgcctcgacaccaagacgccacccgctagagagcctacgccatcgaccgagtagtctcgtcctggctagctgtctcatccgagcgagcctaacccgccgtctaaccgcgtcgccaagctcgacctcggcgcgtcgtagcgcgcgccccaacctcctcgtccaccggcttcggacccctcgagatggctgcctcaatacgctcctggatcaaggatcggctgacacgctacgaggcgaagaataaggtcgacctcgtgccgtctcccggggccgaggtccaggtcgagaaggttcggctccgtccgtccatccgacagtcgagcgcccagtcagctgacgaccgctcgctctgtctgagcagtggctgacgttcgaaagcccgtactgggcgagagtctgcgaccgcgagcattcgatcgtcatccgcgtctcggacgaggcagctcagaagttcttcgagtacgtccgccaagctacaagagggcggcctgagcgcgggcttgcccgagcgacgcgttgctccctgcgcccgaagctacgctgactgctgcctcccctctcgcctttcctaccggacctacagccagtacgagctcgcttgcacaaccctgctccggggcatcatctcgatcacgcccttccagccgatcatcgtccgcctccggcccggttacgagccgcagctcgcgctcgacgtcaagggcttcaacaccaaggccatgggcggcgacgtcctccacttccaggggacaaaggacctcgccgaagagccttgggcttgcgagtggtcgcggcggattgcacagtgcgttcatcacttggcgacccgtgaagggagcgaacggctgacagtcggcgaggcacgccagggcgcatccggagctcaccagcggcgtcgtccgccctgatcaggcgaaagctgccggccttgtgccttccatgcccacgggacaggcagaggccatccgcaagcctctgcgcctcccggacgagtcgcgcgtcaacttcctcgagctcgggtggtgtctgatccgcccagaccagcaagagatcctcgatcgcgactttcgtgcgtgccttctcgccctcgagtttcaaaggaggctgcaagcgtctgactgtgctttgctgttcctctcagccgacccgccggtcccagcaaagtatgcgcatctcttccccggctgctcagtcatccctgattcgatcggctcgacttccaagcccacggcccggccacgcgcagatccgctgcatctcgaggatgacgatcaaggctcggacgacgagctggcgatcaagcctccgccggcccggatcacctcgctgaagaggcccgtgccacccacggagggcgtcgcacaggtcgatggcggcgagcggccgacgaccttttcttcgccgccagccgagcgagcgccaccaggctcgagccagagccacaccgtcacaaattcgtcaccctcacacttttcggcctcgcaggaccagcgcaacgtactggcgggcaagcgagctcggacgtcgctcggcacggccccgcaaggaagcaaggtgctcgtcgcggcgagcgactctgacactcaatcgcaggagacgcggatcgagtcgcaggcgcgaagcggcgggccgcggacgagcagtggcagcggtggagctggccaggcctcgacttcgtcttcgtccgcgtccggcggtctccgcggctatccggccttgacggcgtcgacgatggatgaaccgccgtttacgctcgcgcaacacaccgtctcgctccagggcaacacgccctcgaccagtactcccgacgacaacccacgccgtcagcagccgtatctctcgctcgaggcaggctcggcgcccgtctcgtcgagcgaggctcagctgacggcgacgcaaatgatgaacagcatcggccgcacgcaggtcatcagcttcactggcgatggcgatgtcgacatgcgagtcctcacggtggccaccgaggtaacgaccgaggtcatcacctcgcccgaggacgagtcagccgaccttgcccttaaaggcgcccgagtcgagccaccctcgcaggtcgacggcccgagccaaaacacagaggcggatgagagccgcacggatgacgaggaccgcatcggacccatggtcgggctctctggagcagctccgactctagcagctgtggcgccagctgccgacgcaggagggccgatcgtcgagaatgccgagatgcacgaggaggagggagcgcccgccgtcgagctcgcagcaaaaaagcagactggcacgctgcccgacgtactctcccgggtccaaagcggcgttcggagtctgctgcaacccatcgttgccgctgcggacatgctgccggccgccctgcagccgacggctcggctcgtagagaagtcgcagcaggctacaaacgaccccttgccgatcaactcggccatcgtcgtcaagccgagctcggcagccgaggcttcgcccgtccaacgcggcctcacgggcagttcggcaggcgacgcagacgccgtcgatgccctcacgcagagcgcatcgcccgtcgtccctgtcaccgtggccgacaaggacaccgagattgtcgccgactcgcagccgccatcgcggacccgctcgcaggccgacctctcgctcggccccgagctcgactcgctagctgaggcaggcggctcggtctcggtctcgcagatgcctcctcgacgcgagccgtcgcctccagcacagagacgtccagcacagagacgtcagccaacaccaccacagcctatacaggccccaccatctctgccggtcgacgagcccgaggtcgtcgacctgcgctcggcctcgccagagatctccatcatctcgcctccggcgagctcgcggctggctgcggcaccagtcaatactcgcggcggaccgtcaaaccgagcgcggctgtcgaccggtggcccctcatccatcgcacctccgaccgccgcctcggttcaccctccgccgccgccgtcgtcatcggccccgcccaggccaccgccgccgccgcccgcgccggctccgcggccgatgccggcctaccagccgcccaagccgtccttcacgctgtcgcgcacgctcgacctgccgccgcaccacggtctgccaatgcttgacgacgtgatggatatcctccggcgggcgcaggctttccagagccggcggtcgcgctgaaggatggccagggttgttcgtcgtcgcctgtcgccctgcctgccagttatctcatccatgcccgcttcgagttaagcaacagcatccgagcgcagatcgaaacgaggccaagagaaagagggagcgaaaccgaagtgaaaaagggggttggtgagggcagtcagaaaagaacatccgcgggtggggggggggggcgctcaagcgtagaggccgacagcatcgaggcagccgtcgacgagcgccccggcacgctggtcggcattccgtagacggtcgacgatgaccttcttgagttcgttggcgctgcgagaggtaagctgtcagtctattggtccgcggcggacaatcgggaggccggtacgcactcggccttgacatcgccgcgtgagtacttgacctcaacgtcgacagcgatcgcctcggtgctgtccggccagcgtgcgagcgtctcgagcgtcaggtcaaacgagacgatgagcttggccttgatcgggcaaatcatgacggtcgcctcggctcggacgacgtctggcgacggcatcgtgtaggcgacggggtagcgcagacgaatgagctggagctcgtgcgtcaagcggatcgtcgcgagccagagctggtggactcgctggacgagctggaacgagggagagagagagagggagtgagagagagaaagagagagagggagagaagggccgtcgtcagcgaacggaggggcggttccgacggcgagtgcttcgagacgcactgcgggaacgctctcgaacgagccttgcttgacctcgcgctcgaccaggccaaatagcttggttgccagctctgggttgcgcttggtcctcgtcgaaccgacgagctcgaccgacgctcctgccgacgacggcgtcgagtcgttgcaggcgagcacaagcttgaggtcaccgaggatgaccagctcgatgtgtgtcggcgagcggtcggtcagccggaccgagtggaggtactcgagcgtccggacctcatctaaaggggggggacttacgatgtgagctcaagtgcgccccagactcagtgcaagggaggcagcgtgtgcggacggaccttcgagctcgctcagccgctccgaagtgaaggagccggccgaggcattcttgccaaactcgatcgcctcgaggtacgtctttttctgcgcagcgatgctctcctttttggcctggagactcacgagaatgacgcccgtgtcgtgcatctcggacttgacgccgtcgatctgatccctgacggggccaggcagagaaggcaacagatggagcaggtcagcatccaaggcccactcgcgcgcactcagcagagccacagctttgacgcacttctgctcctggatgtcggaccgccggtgagcgagctcctgctggtcgcacgcctgaacgtcctcgaccttcttcttctcctgcgcgagctggagccgcagagcggcgtgcttggcgcggagctcgacgaggctggtctcgcggtcaaaggcggccttggccgcggtcagccgagcacggtcctccagcaggtcggcgcggtcgttctcgtggcccgtcttgagcggcgtcaggatgtcgagccgccactcgagccagcgcttcttgaccgtgtgctgggcgtatgtcttgaggtgcttgagctgtgtctgcagagcgagggcgaagagcgtcggcgtcagtcttgtccgtcgcacgaagccaagctggccacagacggacctcgatcatgcgcttttcgtcgtcgtcggcctcgagatactcggtgaagaggagcgggttggcgatcgatgcctcctcgtcgagcacctggacgatctgccggctcttctcggtcgcctcgcgcaggttgttgcaggcctggggacagaggccgagcgtcagcgaatgctctcccggtcgtcagcaggggaagcagagcgcacccaatggtagacgacataatcctgcatgttgaggatgtggtgggcgtagtcaacgagcgagtactcgcccccgctccggccggtgccctcggttgaccggcgatggaggccgagcatctcgcccggctgaagggtcgagcgccgtcggccagcggtgatgttggtcatgaacgagaggcccgtcatgtcgaggaactgattgagcgagaccggttcgggctggaactgatcgaggaggcctgtcagcagagtccaggcgccactatcgcaaggcgggagggcactcaccatctcgtcgtcgtcttcggcgtcgaccgtctcttgcgacgcgcgcggtgctgagcttgcgacgcctccagcgatggctaggctaggccggccgagccgcttcttacttggcgtcgaagtctcctccctcgttcgggctggcggggcgacctcaggcggagtcatctcgcgctcttgggcgacctcctcgtcaaacagctcgtccgccgcagcctcggccgaagccatctcgacttcggccccaacctcgacctcctcgggaggagggttgaagaaatcggccgtcgcgtccgagagggatgcgccgagcgacatcggcggcgcagcctgaggcgaagtcgagaagatgttgacctcgggtgcagctggtggcgggactgcagcgggcgagcccgcccgagcgagaggcgaggcgaaaagcgaggcagggaacgactgctttgcgccgccggtcgaggttgcgggcggacctttgggcgaagcgcgcgcaggcgagaagattgagctgaaggcattcttgacgggcgagaagatcgagtgggtgggtgccgttgctgctgcgacaggcggcgcatcgtctgctgcagccttgtctgtggcaggagcgtcgtctgggaccgaggtcgaggcagacaggccaaagagacccccatcgaagcgaggcgccgcctcggaggctcgccgcttcgcagggctcttgccaaaaagcgagcctgccgactcagattcgtcgtcttcggcaggtcgcttctttccgccgggactggccgcgagcgacgcccgtgaccgcggctgctggccctttgcgggcgactcaaacaggttgcgcgcgctcgacgtcgacgccgagggggtgaaggccttggcttttgccgcagacgatgcagtcggcctgctgagcgaagactggattggcctggtcggtgtcggggctgaaccggtcgcgatcgacttgcgaggcgacttgacgggcgaacgcgagaacgactggcggagcgcgggcgcagcgagcgacgaccggccggacgaggggccaaagatgctcgacccagagacagcggcgggaggggccgatgtcaagatgccgccgccagcgacagtccagtccatgccgccgtcgtcgccttgctcgagctcctccgtctcgtcgtcgtcgtcgtcagcggcgcctgccgagccgccaaagatgccgccgccagcggtcgtgtagtccatgccgtcgtcgaggtccatctcgacctcgtcggtcgaaacgtcgaagggcgaggcgggaggcgcagcgaagatgccgccctgggcgttcgtgaactccatctcttcgtcgtcggcgtcgtcgtagccctccatttcctctgctgcagcccttgcggccgcctcttcgcgagaggttgagccggtcccgaccggccgggcctgcgcagcgaaccacgcgttgagccgccgggcctcgtcctcctcgacgccgtagccgatcgagcggcggacgttggcgtcggccgacggaggcgcagagggtgggatgatgccgccggtggcgacggtgaagtccatcgtccggtcttcgtcgtcccgcggagtgaggtcgtcctcgtcgtccgagtgggccgagatcgtcgacgccgagggggaaaatggcccgtcggctgctgctgctgttgcgggtgcaggcgcggcgtggatgccgccgaccgcctgcgtcatctccatcgcctcctcgccgtcgtcgtcctcgtcgatccgggcgtcgtcactgtcctcctccattgacatgtcggcgctgccctcgctcgcaaagctcgcagccgagctccggcgccggctcttctcagcagctggaacagccggcgcagcaggaccgccgccggcggttgttcctgtcgaggatcgccgacgggtcgccgtcgcagccgggccagcgctcgctgatgtaggcggtgggggagccgagaagatgttggacttgactggcgccgttggagctggcgagggggcagcggctgagccggacgagctaacggacgacgtcgactgcgaaagggcgccttgccccgggtcgatctcaaacatcctgcgagcacagttgaggtcagaagcggaacgcgactcgagcggaacgtgtgctctagagcagggaaacgcacctgacgtgggcatgtgctgcaaagcttacccgccggtcgagcatccgcgtcgtgctctcgcccggcaggcgccggaactgcgtctcgttctcgtcgtcgtcgtcgtcgtcatcgtcgtcgtcgtcactgttgccgacgcgagccatctggcggtggagcccaatgtgaccggtcgtaaagttctgggtgacgtcgtctgggttgtacgtcttgaggatcgacttgcgggggacctggtcggaggggggtggcgggcgtcagtcaacagagctccgatctcgaccggctgaagctgttgccaatgctcgtttcctcgctcgagcgatccaggcacacgcggatggcggagctggaccgcaagtggccattcgtttctgtaaccctccagaccaccccgcagcctgacgccagggactgagcgacaaagggactcacgagagctcgtcgcgcgaccttccgtgggctgagtccgccgctggcgctggcttcgtcgcgcttgccaaagacggcgaccggtctgctaccgccaaggccgaccgtatcgcccggcgcaaagctggcggcacgcttgccggccttgggcctgctgctgctgctgccggcggcggccgtgacgttggaggacgagctcgtcgctgtcgacgggaccggcgtcgggatggccgacagcgacttgcgcgtctgcctcggaggggcggccatcggtgttggccaaggaagcgaggtagcaagcggcggcaccaagagggctgtgagaatggaatcgtcggttgtccttgagtagcggtgtcgagaggggaatgaatacagacgaagggaggcgaaccggatggaccaacaacggtgcgcgccgcgcgtgtgcggcccgaacccagatcaggctaagctaccctgtttggcttccatttggattcacccccgcagccggccggtctcttgggcccactggcagccgcccgcttctccctcaagcaccctccctccatcgtctctcgagcacctctgccatcaagggcttgtcccggtcgcgatgccgcctgctgccgccatcgacgcactcattcggccgctgctctggctcgcgctcggtctcctccatctgctcgcgctcgttctcgcgctcgtcccagccttccccccgcgccggcgcaggtcgtcgccctcatcctcctcatcagcagcagcgagcgcgtcgaccaagccgccgccgagacacgtccagctacttcttatcgcgccgtcagcgagcgctcgcacgtcagacgcgaggaacgcagctgtcgaccggctcctcgtcgagagtgtcgcgcgcgcggtcgactgggcgacggctgagggagtcaccgagctcagcgtgttcgaaccgtcaggtcagtcctagcacaccgccaaagcacaacaatggccctactgaccaataaacgctactccttacggcagaccttctcccgaagctccacggcgagcttgtcttccggctgacggcgcgtcctccgacgccgccaagctcgaccccctcgtcgccgccgttcccagtcgaccggcggcccctccgaccgaccgagcagatcttgtcacaccctgctgcgcaagcatactcctcagattggaaggacggctggatcacgatcgagtgcgctcggccggccggcgacagcgccaggaatgcggttcgaagcgacccggccggctcgccgagcgtggtgtcgcctgtcctgctccagccgacaagctcagccgagctcagaggtctggaaatgcatcccgcctcgaactcaacatcgggcggtctgcgccatcgcaacccagcctctagctcaaccacggccgatgttccgaccgatgcgcagcggctccttggccctttccagcgccgaccgcttcaggtccatctccttacgacccagtcaggtcagccactcctgaccgagcttgcacgctctttcgctgccgagccggacccgccagagattgatgtcgggagcgtgacggccgctctcggtcggcgactgccgtttagccacctcgatccggacctgctcatcatccaccggctcgagccgtacggcgtcgatgaccggccaaccgcctcgtcgtcttatcccttgccctctctgcacgcgcgagaccgctcgcctggccccagccgattagcggcacctgcagaccccggctcgcggccggcttactggtcgcccgcccgtctcgcacgtcgctgggcgtcgtcgctcgctcgtgcggccgctgttagggcgtctgaccgaccagggtcaacgtggtttagcggaggggacgagagcgtccagttgtacggggtcggcatctggggcctgcgcgtgacggaaatctagtgcggcccgccttcttccctccctttcaagagagaacgacaactgacctgacgtcttgtgtgcttcgcctacttctctgcagccagacctcccctcgaactgcagaggcgccgtcaccacgcgcgggccggccgtctcgaccgagagaagacgcctgccgcgcgctcgaccgcgaggactgggcgcgggcgatggacgcctggcgggggatcgagcagcgctatggccgatagacatggtccttcctgtgatgcgacctggagtgcgcttgctcgctcgtcatgcaagtggtggatcggaaacgggggcagaaggcagcaagctgttgctgggtcgcgagtcctctggcatgcgctttctcacctccgggttccgcgtcattccgcttgcgggcatcggctggcaaaggccccttctccttgtccctcccctcgaccgccactcttaacctgcccccgactctcctctgacaacacgatggactcctctagcctcacccgctcgcccgacagtcggttcctgctcagctgtcgtcggctctccgctcgtagctgaccgacccgcctctcctgcccgtcccgcagagcacgcccagaagctgctctcgtcgacctccttcccctgctcgccttccatttccctctcggacccgctcctcgcccccgccggcgagcggccgatccacggcccgagctccgtcaaggccgctctcgcgctcgagcacctcttccggcagacggtccgcgtacgagcggccgactttgacgaagggacgcgcgtgctcgcgctcgagacggcctcaacctgggctctgcctgttgtcgggctccttcggctcgaaagcgagggccggacggaaatcttcctcgaggacggcgccgagggtctcgtcgtcggtcggatcgtcaacagcgagtcgatggacgtcgtcacagccgaagcgctcccaaaggccctgtccgttctcgttcctcgctcgctccctgccttaacttcgcttgctgaccgctaccctttcaacctcccagtgcctacccgattgcgctctctctcactctcctcctgcccctgctcggttcgctcatcgtcgtcatcacgcacgcgtcgtctcacgtccggcgcgtcgcccgccgccggccgtcgggccccgtcgcggctgtcatcaacccgctcgacaccggcctaatcgttctcgccctcatggctgtctgtgcgctcaacgtcgtctcgtgggctgctggctgctggaagggtcttgtcggcgataagggcatcgtcgtgaaagtcaggtgcgtgccgccttcaagttggtcgcttggcgcgactttatcgctcacaccctcctcatactctccgcagcctcgactcggacaagaagaacaactccaaggacgacaaggtgatcgcctcgtctggcatgacctcggccatcaaggccaagcggacgtcttcgtcttcagccgtttcatcccgcgccaagcagagcgagaaccgcggcacgacctcgcccgcggcctcgtccgataagcataccgagctcgggctcgacgagcgctaccctcaccatgagcacgtcgtcgaggacgtctcgcttgcgggcgcgataaacagtggcttggctggccttgatgagcgtgtgccggccgatgcgggcaagccgacccagaacggcagcggaaacggccaggctgagaagaccgagggcgagggcgagagcaagaaggcgagcggggcggctcctagctcgaccgaggagcgttacccgcaccatgaccacgtcgtcaaggaagtctcgttcaaggacgcaatcaagagcggcgtcgaaggcctcgaccccaaggtccccaccgagtcgagcgagagcaaacaggacggccaagacggcgccgatgagcccgcctcgaagccttcgaaggccgacaaggagaagagcaaggcgaacggcaacaaggcggcgtcgtcggacgcttcagctaccgaggagtcaactgccagcggcgacgacgacgagcgctacccgcaccacgaccatgtcgtcgaggagatcaagttcgccgacgcggtcaagtcgggcgtcgccggcctcgacgagcgcgtctcggtcgacgggcagtagagtcctaggcatcgagactccccccccccccactcgctagaacttccttccactcggaccgtttcttcgcacacccatcggcacgctttctccattttagccgatcagcacccaccccactgtatccaacgcctcgtcgctcgagtcgcctcccggaaaagggtcatttgatgcttgcccgagtctggcgcgcgagcaaggccgagccgcctccgggcgtgctcgatccgaggaagccccttcccatcgagggcgagccattgccagcctcgtcgtcgcaaactcagtccagtcttcgcaagagtcttcgcgtccttctctaccgcggcttggtgcgcggcttgtcgcagcagagacacggagtcggcctgcaacgagacgatcgggcgacatgtgcgggcgtggcgacaacttgcgtgcccaagcggcggcagcaagactccgcctctgccagcaggcagtacaacttgtagggccggcctgatgacaatgtaagcggtcaaccaaggttgatgtcgttgagcgcgaccgcgacgcaggcgctgcggagacaagacggccatcagtcagaaccaacttggcaacagagagtcctgcagacggcgccacgcaccggtggtggccgttgtactggcggaccgtctcgcccgtggcaagctcccacagacgggcgacgtgatccgagctcgctgcagaaacggaagaggacagcttgtcggtcagcgagcagggatgcacattcgagcgagagagcgcgcgcgtaccagtgacgaggtaagccgagtcggcagaatacgcgcagtcccagacccagcgctggtggccctcgagcacgcgctcgagcttgaactcgaaattctcggtcgaccagatcttgatcgtcttgtcggccgagcaggtcgcgaggtgcctgttcgagaggaagggggcctggtcagcgaggccgccttgcgcgaatgctagcagctgggcacgcacttgacgtctgggctgaggaggacctttgtgatgtacttggagtgggccgagaacatggtcaccggctggagatccgtgtcagacccaggctcaaacttccaaacatagacattgccctgccggggattgaggcggagaggatggccagaggcagtcagcgcgggactcgcgtcgcaacttccaactgctcgcaccttgttgttgcctgcgacgagcatcgagccgtctgacgcaatcgatacgctccggatcggcacgtcagcgtcggggacctggcggttggatggtcgggatcagcttcgccggccaaactgacgcgggccagaacgcaggtgctgaccagctcgtgcgtgcagctgttttctgcgaggtcccagaccttgacgctcccctcctggtcgcagctgacgagctcgccttgattaggatggatgacgacctcgttgacggccgccttgtggtcatagttgcgctggatgtgactcgtccgggtatcccagatcttgagcgaatggtcctcggacgaggtgacgagccactttgactcgcagtggaaggcaagcgatgtgatgttggccgtgtggccctcgaaggtagcaatctgagtgcgagcaggttgagaaggggcgtcagcataaggtcacctgacgagacgagacgcgcgcgcgagcagaggtcgacggaccggcgttgcgttcgccgggttctgaatgtcgtagagcctgcggcacggaagagtcgagcggagagtcgtcagtatcagccgacagagcagcaattgtcagtgggagccgtaccggacgagcgtgtggccggcggcggcgaggatcttcttgtcgggcgagatggcgagccgggtgatctgcttctgctcgttcggagggaggccgtcgctgaggtcagcgatgagctccggctagagctacagaccacgccgagtactccgacgagctcatcgcccggcgagacgaggccgattgcggagcaaggagggcagcgccagcaaggagggggacgtacagagtcggcgttctggatcgtccggccgcagatgcccgaccaggcctcccagaacttgatcgtgtggtcatctggatggagtgtagaggtccatggtcagtgctagccagtcgctccaggactcgcgtcggacgataagacgcacagccggcggtgacgaggacgaccgagaggtcctgctgctgggccggggctggcgggggcagcggcgtcgcctgctgctgctgttgctgctgctgcagctgcagctgggcctgattcggcgggagcggtgcggcggtggccatcgtacaggaggtctagcggatgggagcgcctctggagcagcgaagaaggtagagctagggcgggatgagggcaggatcagggtcgacgtcagggagatagctagcagctcaaactgaggtcgagttgatcgtcggagaccagccgtcgacgtccatcagcttctcagctactcatgtcgccttcctcgccgccggccgaagtagtcgcctacctgggcccgccagggacttactcttaccaggtacgtcgctcgagccgttgctggtctcgcgaagtgaagcgagggtgctcaccgccttgctacctccttatcggctcaggccgtcctcgaccgctttgggccgggcgctagctaccggccatgtcggaccatcgcaggtcggtctgccccccgacacgcttcaaatgagctgctagagatgctgacatgctgctcgcccggccagacgtctttgcttttaagccctcgtcggccgaggagcgcgctcggggctgggtggccgcggtcccgctcgagaactcgaagaacggcatcgtcctcgagacgctcgacctcttgctcgccgccggtactggcaagggaaagagccgcgcctcgccgtggacgattgatcacgaactcagggtcagggtccggcactgtcttgtcgtcagggacgcctttaaaggccgcctagacgagatcgagtcggtgcggagtcacgagcaggtgcgtcttgccgcttgtcgcccgtcgccagcatgatcgatgtcaatctggaggctgacatgacatgtattcttgaccttcgcgtactcaaggccctcgctcagtgccagacgtttctctctgcgtcgctaccctcggccaagcgggtaccaaccgcgtcgacggccggcgccgcccaatcgctcctggagccggggaacgagcgtggggctgccatctgcgcccggaacgtcgtcgacgtcgttgaggggctgaggattgtctcggaaggcgtcgaagacatggctggtgcgtcgcgtcggtcgggaccgccgcagcggcgcgcgaagctgacttctcgtcctcgtccggccaggcaacacgacgcgcttcctcgtcctgagatatccgccttcaggtcaagcttcttcgacgcaagtgaacgcaacagcaggacggaccctgcactacttgtcctacacgccgggcccattggatccaccatcattcgctgcgccgctcgccctgcatgctcgtgcgccatctcgcatcgcgcccgtccttcgtgcggtcgaccgacgaccgaccggtgatggcggaagccactacctcgtgtgctttgcgaccgagggtggtcagccgccggtcgacgacgagggcgaggcgacgactgcgcaggcggcggcggagcgcgagcccgaatggcgctgggtcggctcgtggccagagcacgccggcgagggtcgatcggcataaccgttctggtctgctcttgactgttggcgttctgaaagctcctctctttgtgaccggtccaagtgccctctcgagagtacgcttggttcgatgacgcggtcgatcaggctcagcatcggagatcacggcggcagcatcggctgcgccccctgccagcccctccgacgaccccttcagccccagagacgaccatctctccggccattaccttcgatgccccgtctgctgcctacctccctcgcccgcctacattcatccatcacccgcatcgccaccatcagcagccgcaccatgtcgaccggaagccagacgcccaagatcctctcgacgaccgagctcggctcggccgacgccaagtggctcagcctcaataagctcgcctggaaggaccaggacggcaaggaggtcggtccctggccgcgcgttgcgctgctcgacccgaagctgatttctttctccgcctaccagcgcgcctgggagtgtgcctcgcgcaagacccggtcaaagggcggcgtcgacgccgtggccatcttcacgatcctccaggccgagggacagccgaagcggaccgttatcatcgagcagtaccggccgccgattggcaaggtcgtcgtcgagctccctgcaggcctgatcgatgagggagagggaccgggcgagaccgcccttcgggagctccgagaggagacgggctacggcggcaagagcgagggcgccggcaagactgaggtccgcgagattagccccgtcagcgtcaacgaccctggtacgtctcgctcatctgtgctgcacctgctgtgtccgacctgacagtccgcgctcttctgccaggcatgaccgacgccaacatgcagctcgtcacggtcgactgcttcctgcctcccgggaccgacaacccgccgcccaaggccgagcttgaggagggcgagcacattatccagcgggtcgtcgccatcagcgagctctacgacgttcttaagtcgtacggcgacaaggagggctacacggttgacgcccggctctcgcacctcgtgcgttgccttcggaactctgagcagctgcgcgactttgactgaccacctcctcttcacgcgcaggcctacggccttagcctgaccaagtcgctcaacctctcggacgctggcgctgacagcaagccgccaaccaaggccaagcaagcggccgtcatcgaggacgccgtcgccgacgagatccgcgaggccgagcaggagcaccccgaggcgatcgaaaagggcaagggcggcatcatcatcggtgaggagcaggccgtgccgacctcatagagcgccgtttctgcaagactgcttgcctctcatctcgtcactccctgctgtatccctccctttgtagcaccagatacctgcttttgttttcggaactcgagcgatggaccatgtgatcatccgaagacaaggaagggtagagcaagaagagacacggagaggagcaagagaccgcgcgggcagaccaaaaggagaggagatgtagggagaagagacgcagtctaggagagcagagggagccaatgttgacgcgagatggagagaagggcatgaggggtcattaagggagagcggcaccgaggccggctcagtactcgtactcgagcgaaggattaaccacagccgacgacggcgtcttcttgtgccgccggccaaagctgaggcccttgagcgccgtcgcaaaccgaccgctcttggtggcgttgggggcggcgctcgcatcgccgactgtagtgtcggtccaggcggagaacatcgtgttgggcgtcccggagcgcgtacgctcgcgctcacgttcgagctcggccttggagaacggcggcggcggcgtcggcgagaagagcgaccggagtccttccgagagcgagggcgtcgaccggtgcgacttgcgcgaagcctgcgtgccgttgccgccgcccgagcgcgagcgggcgagcgacttaccttcgcctcgggtcgacgaaagtgtgccataggggccggacgccgtgcgcgattcggcccggtcgagtgggatgaactctacaggctcgggcgaaaggatcgaccgcggcgtcaggagctcggaggtgttgagcgtcgagggcgtcggcggctgaggcgagggtacccggtggctgagcgcagctgactgcaggccgagtgtagaaggcttgcggccgtgtgtcggcttgtggctcagtacaaggatgtgcgacggcggagccggaatccgcgccgtctcgcggtcctttgtgagcgccaaccggatgttcttaatcgacttgagccggaggagcgaggagcggtgtctgatgggcgcgtacgccggcggaatcggggcgacatcggactcaggcggcggaaacttgaggaacgacaggcgttcagtcgggacggtcgtcaggaccgggtcggagcgggggtcgtgcgccgcctggaagagggcgaggactgccaagtcagagaggagctcggtcagcatgcagttccgggcgtcctgttgcaagggagactgggcgcacgcttcgaccgcgaccgcttcagccgtgtcgaccggggctgctcttggtcagcgacagcctccccaagacgcatgctgccgtcctttgtcggcgcgaagtggatcgtctcgtagatgcggcgagacaccgtcggagccgtctcgcggtcgccacgcccgtcgtcgcgcgccggcgttgagagcgagcggccgccagcaatcgcaggcgagccagagatgctctcgggcacgtcggcaagcccgcgcccgttcgggaggaagacggtctggccgttgagcgtcgttcggctcggcgtcaccttgtgcgatggcgagaggacgtgcgacggccggagaccggccaggtcggtcttgctcggcgtcgccaggaacgattcggactgcgagggcttgtggccgcggccggtcgaaggaggtgcgccgccggcaagcgagttgcggacatggattgagtcgcgcgtctcctcgaccatccggtcgacgctgcgcgcccactgcaatgaagaaaggggtgggtcagcgtcgctcctttcacctggcgtgagtcaaaaggacggacgagcgagatgcggtcgagtttcgtgtcgatggcggcgtcctcagacgactgagcaatctcgatcgacggcagcgacgcctcggctgcgtcgatatgtgatgaaaaatgcgtcagcgagagacaaaagtgacggtcaggaggtgctgcggcaactgacagacgcgcttgttgagcgtcctggcgctcgcttgtagccggagggcgggcgcctcgccgagcgtctgcgggacctgcgaaagcggccgctccttgaccgacgggacaggcacgcctgcagaatgaacggagagggcgttatggagtcagctttagcgcgctggagggtgcaaaggaaggacgaacggcggacgaggcgcgatcgggtcgactgcgcaggctggagcgcccgagcttcagagacaggcgcatgaacgatgacattctccttttcggcctcgtcagcatcggtgtagcggtgctcgacgtgcttgagcttgtttcggatggcaggaccggccgacgccgtcgctgaatgcgcgtccttgtcgatgaggatcctctcgagccgcttgcgcgtttggaggtcgaccgcagcagtcgagcgggcatcgtcgatgagggccgacgtccggcgggaggcagccttgggctggaggaccgggattgccgaggccgaggaggtcggggtcggccggtggtaggcaatcttggtgccagcgctggcagtcgaggtcgaggccgtagcgatgcgcgagcggcggggtgacgaggcgctggccttccgaggggaggcgtggactgtagacgacgctaagaggaaagggagagtcgtcagtgcctcgggcggttaggttacgaagggttgctgggcacggacccttgaccttgacggccttggcagcacggaggcgctcctttgacggactcgccccaagccgcgtgctgacggtcgcgctcgtcagcttcttggtcgtcggccgccgatcgaccgtcttgtcaaagcggatgaaggaggcgacgccgtcgtcgttcgcgttcgaaggccggccggcggcggcgccagcagcagcagcggtcgcggcgcggacaaccttctttggcggcgaggccgtcttcttctcgcggtgcgtccactggccgttgtcctttatggcgttgccgtcaaggccaagcggagccatgttcgctttagtcgcaagaacgctctcgacgggcgttggaggtcggagggtgggcggcggtgcgtgccgcagggcgtctggtggcgaaaatggacgtgcgagaaggtaggagaagggagtcaacatggaccgggccgcatcctgatggtcgggctggagagacgcacatcgcagcgagtcgacctctccccacacgtcagccggcggatcgcgcagcgcccgatgcctgaccgcctcctcggccgtaatccggcgctcgtcgactgggtccgtcatgcgccttaggaggtcctccatcgggcgagagagcgaccactcaccgagccatgtgccggccgcggtccgggcttggtagagctcgagctcggcgggcgtcgtgaaagcctcatgctcagagcgctcgaagggcgtccggccggtgaggatctcgaagcaggtgacctgttggccgagcaggggagggcgagtcggatcagcgacgggggtgagtgaaaagagggggacgagtggacgcacgccaagtgaccagacgtcagacgtccgctcatcgtgctcctcgccagccgcccggttcgcgctcaggtactctggcgtcccccacgaggtcgtgctgaaaaacggccgctgctggtcgttctcgtcagtagcggtcgtggcggcggtcgggccccagtaggtggcaaagccaaagtcgacgaggacgggctcatccttgtccgagaggaggacgttggccggctggagcgttcgacggaaggagcgagacgaggagaggaagggtcagcctcggtctgctcgacgagcgagacgaagaggggtactgaccttgatgtcgttgtggctgacgttgtgggcgtgaaggaagcggacgccgtcgatcaggctacggaagtagggccgcgcacggtcctgggaaggcggaaagcaatcgtcagaccgcttgcgaccagagggcggagaggagggttggcagccgactcacctctgtgatgccgaccggcattggccgctcgcagtaggccatggtgacgagcgcgtacgacggcgacaggacaaacgcctcaaaggcgatgatcgacgggtgggcgttcttggccggcgcaccttcctcccagctgccagcgccgccagcgccaccgctgccgctgatggggagcgagttgagcaccttgacctcgttccagagggcctggatccgagcagtcgtcgtcgtgctcctcgttgagcggtggacgagcttgaccgcgaccttgcggggcgggaccggggccgacgtcggccggctggtcttgcgcgtgcagagccagacactgccccagttgccgtaaccgacctccttatgaaaggtgagtgcctcagagagagcttcgtccgagagcgacagaacagtcggctcgcggttggaggttggaggaggaacggcagcgggggcgacgggagcgcgagtcggcgtccggtcggggctcgagcgcgagtcgaggaaagcgtcggcggaggcaggagtggccaggtcgctgacggtcgagaaggccgaggagccgtaggaggacgacgaagaggcgtcgtacggatactctggagccgtcgagtagatcgtcgtcgtcggcgtcgtcggcatcgcggtttctggtcgaacgaggtaggtccttgtgagctgtcgacggccggtcgcgctcgacgtatccgtcacggctggggcgagcacggctggccgtgctggctcgccgccgaggtcccgtctcgagggcgcgcgagcgagcgtcgtcattctgcgtgaggatgaggcggccgacgagacggaggaagaggtggtgaaggaggagagggacgagggggctgatgttggcggcgggggcgacggggctctctgctgctgcctctgcctctgccacctcctccctgccctcgctcgacgcctccctccctgccgctgccctcgccacctccagccttctcgtccccctcaccctggtcgagaacgagaagcggtccaagtacctcggtcgcaccgccacccctttcttccctctcgttctctctaccgccggcaccctctcccccgcctctgtccccctcttcgaccactggcgcgccctcatgccgtcgtacggtctcttctcccgcctcctctccctctcacttctccgggcgcgtgctcgctttttcgccttctaagttgcgctcccttcctccacctccgtctcttcccctcgtctagctgtcgaactccttgccttctgtccatagacccgcctttgtcattgcatgcctgttacaccataacatgtcaagcgtctcgttcacaacacctctcatcttgctcacgctaccgtattgtcctcgagccgctcgtacccgacacccagcttcggaccgacctccgtatctccggccccgacggcatcaaggagctcgacatcaccgtcgttttgcttgcctcaccagatgctcgctcgctctcgacccagctcacgccaagacgctcaagtacacccgccgggtgtctgctcccttccggccttttgtcctcagctctggcggtgcggtcgagtccggcggcctgaagctactcgacggttagcgcgagtccctcgctccttcgacctactcgcactttgtccgggtgctctcgctcatcctcatcaaggctcgatcgcgactggcccggttctagtgcgcctctccagcttccgctccgcgacgccgcccaccttcgtttgtttcatctctctcctctctcattggctcccctcccttccaagccgcttccgctccgtcttccttcaccctccgtttccgcccgcccgcttccctcttccgtagctcttcctctcgcgcctctcttccccctctcgacgactcccctcctccgtccactctacccctaggcagccgacccgaccctatcccgttcgtctctgtgcccgtcccgcctctccttgaccctgccttacaatattcgatgctgcagtacccccggccgttcttcgagcacaaagtcgagcatcaagtgagtaggcttgcttcggtcactcggcggcctcaagtctcagtacgcgctgctgctgctccgacactgtatacagcgaggtctttggcacgtctaacgcacgctccggaagggcgaccgacctgcccggagtttgacaatcctatgtgctggctgctcttcgtctgtgtcactgtttccgtctttgccttcgtattcctcgcaatttggcaccaccaagttgctattaacgagctaaattgagcagtgatcaccgtaagtaaccggctcattcgacattcacgcaaagttgccgcgacagcgttctgccgtttccttgacttttgctcaggctctttctcttgccagtgggcaccagtatcatcagtgcggcagatccaggcgtcagcactgtcgtcaggcatatgagacgtgaacaagggttgcgtttctgcagcaacgtatgatctactgtccaccgccatcaaatcaggtaccttgattctgaagtatcaactccaatcgaaaggttactttagattacgctccatccgcaattcgtttcaactgcctactaagttgcggcggcatactggcacccgtcgatcattcaagtttgagctgttacttcgcctacacgccactgtgcatgaggctacgagccgcctttacttcggtcgcacgcctcgctcatgatttattatgcttcgagggaaccagcaactacggccggttggccttctcagacctgacgggcgttgagacaaacctgccctataatttgaacgtgatcgtgactgactgactggccttacaaagtgcttatctcaagggcctcttcgatctattcacgccgcggtgaaagcgctgggcgtctcggcaaaacgtaggcaagcttgccgctcctcagatgcttcagtctctcactttcattgtcaaggtttaaagctatccatagaatgtcgcaaatgatctttgaacacatagaagataccattcactttttggcgtcgaagtcaccgggctgcaaacaaaagataggaaagggatagtggtcagaagagaaaagcgagcgagtaagtaaaacgtcgcttttgtcacctgtgttcgtgcaatcaatcaatccataagacacccacccgcccgctaccgagctaacatgatccttccttgaccgacccatctcagaccgtgagttcgccgtgcgcctcctcgcaatttgttgtcagctggctgtcggacaagaagttgaaatgggcctcaaaaagggcaacaaaggtcagtcagtgctttgtcacttcttttggcagcggacgctcgcgagcaagacaaatttcacggtgacagttcttatcaattagtggaagaaaagaaaggacgcgagtcagcagatggagtacgagaaacccaagaattggagcagaaccggctcatttagctcttccggcggcgaaagggtatgaggactttctttaccgaatcagatttgccccagctctgcctgcctgcgactgccgtactctctcgcttctaactttgataatgattgttcgtttagctgccggctcccacgttttcaggaataagccgtcattgacgagtgtaagagaccgcgctcgtgcatttcacctcttcaaaaagtaccgtagtcttgacagaaagctttctttaccgtcctgcgggcaaacaacacggctctttcaagtccgccgcaggcttaaaagaaaggcaacgacaggctggactacctagcttcactcacaacaaacatgaagcttagaaaaaaaagttgcgtactttgctttcatggtttcgtctcttcggctttgaaggcgattcgattgattgctttcccccgccgtgaactctgtcacgtcaacccattttcggcattgagagcagaacttatgccttacgcatattaattgcgcgaacctggaagcgatataaggcaatgaagtgaattcaccacagtcgggccagtcagggccgccccttctatttaatcgtagttgacagtggccttgaccttgtcgtcggttcacttgttttctgatctcaattggctccgattgtttttttctcgttttgactggcaaaccaggaccacaaaaatgtctacgtcatccattgctttcctgtgataatatagagaaaacgttcagctttgtgagtcataagaaccgcggcggcatcaaagaattgtgtaacgatcgcgtactctcttcgaacacggactgtctgctccgaatgtttgccatgtattcccgggaccctacagaataactcccagttcttgttatggtctctctcccttttttccttggtgttgcttgcgacatcttagacaaagtattcaggtgaattgagaggactaggtaacgcgttcaacgcagtatggcgaagacgctgctgctcataaaccttgctacgttttagtttcaagttacgcacgacaaaagaacccggccccaacgtataaagcaacggtagtagcttccagaggcgagcaagagttactctcagcaataggcattcaaagacgaataacctcgaagcgtggtacacacgatccgagcaaaacttggagttataattttgagtaattttgaacagcttactcaattgtgttgctggcggctagtgtgcattcccgtcgaatcctgtgttcgttgctcggggagcaagtgagccatcccaagggctagctgattcatgagcgccaaattgctcagcccgcaaccaatcagctcatgtgaggaaaagctgggctcgaggatattgtaaagtgacgatgacggccttttcttgtgcattcgatatcagattttggacgccttctagatttgataggtatgaaaagttcatattgtaaacgagatttttgtgccagggatacgagtcagacaggctatgcgcctagtgcagtcattccttcggctggcgtacaacgcttacctgacagaattaccacccactgcttgtagaaggcgtggccgcccactcacattcatgcggagccaattttgcagaccctaaaaggtttcgagccaaaaagactgggagtcaatgacaattacctgcgtacaaaggacgacgctctagagctcagacacgcgctacgtcggctgcaggtcaccgtcgttcggaggcaattacgtagacacgggcacggcctcagccgttgtgttgcccggcttgacggccgccgtcgggactgccaccctgtcttcaggagcgccggatgtctcagggccaccatcataagcaacgaaggagaagaaggagaccggaggcaaccgcgagcatctgaacaaaattcgccggcgagagcgcccggcgccgactgttttccatggatcggggtcggccgcggcgcacgtgtcggtgcgcttgtcgtgggcagtaagaaccgacatgtatcaaaagataggaagctgcttgtaaggtgtagaaacgtgatgaagagaagctatgagagctttctctgagcttgagcaaaattgtctggaggcggtcgagacttgctagctggattacgccagttgagtccgtctgacaagggctgaattgacggcagatggcgagggagctccgaacagaacacttaacttctcctccgccgtcagacccgcatctcgacctcataggctcacttgtgcatgcatctctctctccccagatggaagaggcggcgcgggtctttgccgggcaggaagccatccatgctttgcagatggacgagcggcaaggtgtgggttgactccggctccgagctgtcgtctttaaagccagctctggcgctgacctcccgtagcacatcgggttgcaacttgtgtgtgtcatctgactgtctcgttaggcagcccaacttgtcagagctgacgtatgttactgttttggcgtggtcaaggacggcaggcgcttgggaaaaggccgagtgagcgcctgagatatcatccatcccgtctgaatcgactacagctgctggataagcatttgctagcgtagggcagatttcgctcgaccccgtgaaatgaggatcaacatgcgccagtaaaaggtgcgtgccagaagagccgggatgttccacgcggtcgaagacgcacacatccttcccgcatcgagctgctgttcgagactgccctttcgtgtggtttggaagaccatcccgacgtacttatgcgctgtcgtcgccttgatttgtactctgttcattgtgctggctggaggctctgaggcggttggcaggggtcgcgtggcagagcaggtttgatttgctatgaccgagcgccatgcctttgcgcaccagacgctgtcagcgtcaaccttgtcctgcagcggtctaagatcggtcaaaaggagaacctattcgtcggcatgctcaacgtgcgagatgctgagcccgttcagcttcgagccctctgggctcactgatacgtcgggatctgacacgtacacgtttcagaagattggcaacgctgagtcacccgagagggtgcctcggtctcaaacaggtgcgtctacttgatctctgcctcgaagtgcgtaccgcgtctgctcataagcaaagtgcagccagttgataaggggcccgcaagcgctgagggtgtcgggcttagtacacagtctgaattggtttacagtggggaatgcatttgacaagcaagtccatgaaggcgacgagcggcggcgttccattggcagtcgtctcctcgattgcggttcggagcacgacgggttgttgcgggagagtcttccttcctctgccgccgttctgcgttcctcggtcatcagcccgttccgtgagtcttccatcaatgagaagcgccagcgctatctgtcaagaggcagcttcagaggtcaatgggcctgtagctagcggctcgcatctttgccccgctttggcaacggtccagggatttgaggagccacggcgggggtgcgctccgccgagcgatgcagagagattgaagagctcggccagctgatcgtcttctacgttcgatgtctcgatatcttcgccccgttgcgctatcggctgagtgtcgtcagccttgtctaacggtcggctagattggtgaccactcgtggtgtctgggcgagcttgtgcagaggaacgcgaggtcgatcgccgagaccgaacgagcgtacagctgtccgagacagagcctccgacagtcagcgtgaaaaagctccacagacgtgagagacgaccgcactttggttcgtgtggaggcatgggcttgatgatcttgcttttgatcgcgctcttcaacattcgcaggccggccgagttgccggagtcaaagctgaaacgtccttgccgagggcggcgttcctttcctggtgcaggcggcacccgcaggcgtcaaacaggaaagacgcctgcgacaaggcttaagatgtttcgctgtgatcttcacaagcgcatgcacgcgtggtcagctcgttctgcgccatgatcgcccggacgcggctatcagtcatgtgtcgacttggaggacggactagtacgagcgtaccaaggaggttgatcttgaaaggggttcgtgcgcaagcgagatcagctttggaccctcgctatagctgacggttaacctggcgcaccgttatagtagtttagcggaaagctcacctgtcatctcgagactcgttgccgagaggcagggcctcggcgaccttgatcaggtgtggatcgacaggtcgaggtccgtctcgtccgagccaaggtaaggtcgctgccggccgagcaaggtcgtttcttgaacggcgggggcttgcccaagctctggtacctatcccgttgcgtcgcgctaacatcccacagtccacgcaacaggtgggatgcgtacgcctgcggcttgagtcccaggttcaggtgcaaagggtaggagactggggctgcggcgtgacggtggcgcccttcttcttcttcggctgctcaactgggacgaggtccgttccatgcgcgaaacgaatacgcttgccgatccaagggtgggatcggctgaccgcaatttatcgagtggaaattggcaaatcgactattccgctaaacaggatgctatgcacgttaagcaagacttgctctccttccaagaactcaaggttacggtgcgactccaatcatctggaggtcagcgctaggctcggcaagggcgacgactggcagatgttttttattgacgggccaagcgaacagttctcgctttgggcttcgtccgacgcatcacttatcatggctcccctcatcgcgatgccacagacgtgcctgcccggcagtatcaatcagactcatccgcgaccgctcgaccgacaaatcgtcgtacatccgaaaggcggcagcaatgatgggactcgggtttttcgaagtgacttagtgaatggcccgatctcgccgcggtgaagcgactttttcaagtaacctgtgcccgatggcgtagccgaagatggtaaggagtcaggccatatgcaggcagaggttgtagacacgataaacgtacccgcgagggaaaattgtgcgatgaagaccttcgagcatccctcgatcgggcacaacgagctcgttcgctggacgcgcgttgtgggaggcaggaccttcttctcctccctcttctttcgtctacgcccggcaaaagcgacaggtcccgacctagagctcttcgtgggttcacttggcttcgaaaggtcaagctcaacgtaaacgtggccctcaggtttaacgcagccgtcatggcccggaaaaagaacgcctcaaagtcagttggtgcagcaacaggccgacgcctcggggcagaagggctcatgcgacggtctgcgtttgagcatttccatggctcggtcgcaacctgaatagcatccttgagctcagcggtcgacagctgatcgctgcgaggaggtagtcgatacgaagtaggaattggagtccgacggagaggctaatcttgactgtcgagcgaggcaggagagcgacgaggatggaggtgaaagttgtccttgtggacgcagcgtcgtagcagtttggcgggtggtcacccggcaccggctcggggcaggcggccagcgccagcgcgccgccgcccgtcagagccctctccttgtgactctttacttgtccgtgaccccgcgtgacctttcggccaggcaaaagtccttcgagggattctgcctggtcgaaacctcacgctcttctcacacctgactcaagcctcacacctgatttacaacctacctttcccttccgcgccctaccacctctcgcgccaaagagcatcgatttccccaccagacacaagccccctaagagacttcaccatcacttctaccaagccaatccacgatgccgttcaaggtcggaacggaagtcacgcatagggttggcccagggatgacgtcggccgtcgtcgttgctgtccttgagaagaaacccgtgcgtcctttgccaccgtcccttattgtcctcttcgccacctggccgtcagctaactctttcgtattcatgcccatgaaacgctatctagctttcagctcacggcaaaactaggtacaagctcgaaactcacgtcgtttgtcgatgaacgcgccggccgctccggtctggcggcgggcgtcggcgcatgaactccgcccttgtgcgctgacgcctcttcttttccctcccccttcgctcacaaccctcactacaagtctatcgtccgccgagtcagtcattttcgcgtcttctgatgaaatggcctccttgccggctgtctcaatgagtttcagctgatgcgtctcccctctcccctcattgggggcagcgggatggatccttttcaagggcctgacagcaaatgggcggcgaccttgatggcgcgtgcggtcgacctttcaggagcttcgtagaaaacgagaggtcgaggctgacttctgcgaacgacaggacaacaaacaagagggaaaagatacatgaggaggaatgcttaggcgacgtggatgatcaccttgccaatgatgccaattccctccgaagaccgcattgttcaacacaaaggtgtactagtcaggcgctcacaggaaggtggaccaacgtccttggaagcgccacgacgcgcagtcaacaaagatatcgccaaaagagaccccgggaaggtgttaaacaggacgcacaagcaggtctcggcggtgcaatacgcgaccttcgatacggtttgaattcccaggaccgacgcagctaacgaatggcgcgtaccggtcgcaaaggctcaactaaggccagttgtggcgccggcaacagttgtgacggatgatacggccttctcgaactcgtccaaagttgcttactcgctagaagagtacgaggaagaggcgaaagcggaacgaaggtcagcgtccataggctaacttcgaagacgaacagcaaagcaagagacgcgcaagtgagccaagtaggcaagtagccagtgcgcgccgcgaacgacggtgtcgtcgtcgggaagatgagggtagaggtcctgagggcgcaggagtaaagcgccgacgagacaggatgggtgtcccttggcccgagcacggacgcctggatcatcccctgtcatgtcccgtgcagaaagggatctgcatgcgaaacggacggcaaaggcttcaatctgcaagtgtcctcgcaaaggccaggaatcacgtatgcaacaagtccggccttcgcgcgcctcgcacaggcttttgaagaagtcttgattgcctcgctaggctcgagatcgggcccgctcgcccccaggcaaatgaaacgtcgccttgaaggcggtgggtcggcgatgaaagcgtgggaagcacggtaaatgttgcactcctgcaaagcgggtacgtcgacggccggaaagaaggacgctactgaatgatgagaaggattttcgtcacgcgccgctcttcggtcgcaatcctggcgaataagggtcgatcgaccatcgtccttgatggcctcaaacacctgcggtagcaaacgtcaggtcagcagcgaagcgctgcgaaactttgaaagaagcgccgcaccatctagccgaaaggttttggtcgggtcctgtgcgcagcgagcatccagtcgagcgcagcgcgaggaatgcggaggtcaatatatatggattcacgtcaacgggcaggaggaaagaggctgcgagatcgtgagtccccttccgtacttctctccctgtccgccgaggctgacctcatgcctttctctctgtcagctcgtctctgccaccgtcgaccggcgcctgcagctcgtacgttaccctcaagataacagccgcgctatagccggacgtctcaaaggatgcgtccggcaagccactagatttttaaagattattaatgattgattagatcgattgacatctaaggccgattggcctagtggtatggcgtaagcttccgatctacactgaacgcttgagatcaccggttcgaccccggtatcggtctaatgttttagcttttttgcgaactcgctctgcctcctttcccttccctccggcgctatatcgatcattgcctcgtctcttttcattctccctatgctgtagccgcacaagagcaaattccaacacatcgctgcgaacgggacactaactgggcacttgccatcacttatgacgtcgagatccgcctaaggggggtggtgacttccgttacctctcctggacttctgttccaccctgtcgttgtcgtgtcgggaagagacattaagtggtggcgagaagacggcttatccggatcaggctgttatggttcaacttgccagcaaaagcaaacacatgaccggcgtcgtcggccgactcgtgcgactcggtaccgacatcctcgccttggtctcggcctcggcatgagcggcgttcggcacgagagtggcggcgtccgagtcgatgccggccacaacccacccgacccacgcgtcagccgtgtacaggtcctgttcgacgtttttgtggatccggccgaggacggtgtcaaagattttgaatgaggactcgcgcggcttgcgcggaacgcccgctttcagctccacgacatttggcatattccccttgtcaggtccttgggggagtagggcgacgctgtcgtgtcattggcgacgagaagctgggttggagcagcgccagtgtcatggttcgacctgccaggaacagcaaatccccggcttggggttcgaacccagggcctcagcccgcacgacagaagagaagtcaagcactaccagttccccacccgtcaccggttcgcaactttcacgtggaacctccagcgcgacacccgatcaccaccggccgagtctagacccggcaaccctcggccgccggtcgttctccggcaccagctccgccggcgtgagtcaccagccccaccggatcagtcagcatctccaccggatccgtcagcaggcacagccttccagaagattcttcgccatcacacttcagcctacttaaacccctgtagacctcgagtcgccacctgaatctcaagcttgcctctttgttccccccatcactcgtccttgcccgtcagagctccagcctcccccctgttcgccacttgcaccctaacactaggcaagcttccagctggcgctctcacctcgccacctcgcaaccaaccagcaaccaccaacaaccttcggacttttcccacctcactcgccggagcctgcggctcagcgtttagcagctcgttgaaacctccggttcgacccgcttgcacaatatttctgccgaccttggtaaagtctgctctgcagcccctggccattgaccactcctggcgggtggtgttcgtcgaacgatctagcttacaaagaccctctcaaggacgcttgtctctgcaattcgtgaccatctcccgggaggtcatttgatcgcgagctcctggcccctcggagtaaccctgctaaggcacaacgccaagttgacgagcgtacggcgtcgacgaagctgcgagctagggctatagtcttcacaagtaattcccctcctccttttgctctcggtacccacctagatcttcgccgcgggagatcagtaacacactcaggtgtcgcggaaaacgcttcgagcgtctgagtctctttagaactaggtggaccgaagcaatcggtctgcatatcctcctttttaggataaccccttccgttccaactctcgaccggcccgaccgacccacaatctccaaggtttcggccctctctcgccttttccaattggcccagtccccctcccttctcggcttcagtctcaagaccctctaaaacccaaaaacaaatcaaaatcagcaaaaaaccaaaaacaccctagatgtcctctaacgacaactccgacctcgcggcctacgtccagcaccagcaaagcatcatggagcagctccaagcccaaatcgcagccttagaggccgctcaagccaccgccgcggccaaccaggccgcaaccgccgccgcggccgctgcgtccgtccctgtcgcggcgtccaccgtcgaaccgttggcccctcgactctccgagcccaaaaccgccgcacctccgacattcgacggctccaagccccgcgaatgccgcgcttcctcagccattgccggatcaacttccagactcaaccctctcgcttcgtcaacgaacagtccaaggtcttctatgcaattggctacctccggggatcggccttcgagctcgtcgagccctacctcgatgaaactcgccatcttacctgcccagcctggctcgacaccttctcggcctttgccggacacctcaactccgccttcggcatcgtcgacgaggtgcagcaagccgagcgacgcatccgtaccctccaacagaccggttcggccagccagtactacacgcgattcctctcccttgcctctctgctcgactgggacgaccacgcgcttcggtctcagttttacttcggcctcaagccgcacatcaaggacgatctcgcacaccacgatcggccaacctcgctcgaagcccttaaggaactcgccatccggatcgacaaccgcctcttcgagcgactccaagaacgcaaggacgagcgcggcaccactgctctcccgtcgatcggtgccacacctcggccgggattccagcccacgcctcgtccgttcgttcctcggtcctcgccagtcgtctccggtccgactcccatggacatcgacgccgtcaacaccacctctcctcgcggtcctctccctgctcaggagaagcagcggcgccgacaacttaacctctgcctctactgcggccaacctaatcacacggtcaacacttgccccatcaagccccaacctcgggctcaagcggctgagctcaacctcgctctcgtgtctggtgatccagagaccccggaaaactagaaggctcagcatcaagtcctctgctgagcccgaatagccatcccaagccgttcaaccggccccccaccaaagctcaggcaatttccaactcgtctccaagtctcggccctccggccgccctcacctctttgtcttctccttccggcaacgcccttgattccgggctgcttcctgggcctgagcttgaaaagcgcgtcattctctcggccaccctccgcacggccaactcttcaacggccgtccgaatccttctcgactccggctcccagctcaacatcatcaactccgactttgccagaagcctctcggcacccatacagaaactccctgtcccacgttttgcgacaacggtcgacggttccccactctcaacagggccgatcgactctgtcctcttcggccacctctccttcggctctcatgaagagaaggtcgccctccaccttgccgccacctcctcggttgacatcatccttggcatcccctggcaccgacgccacaatccggtcatcgattacgctcaagacaccctgctcatgcgccaatccggctccaccctgattccgctttcagtcaagaactctccttcgaccattaagtccagccctttacctgccaagccgctcgtctctcttatcgacgaaaaaatgttcgacaatctactcaccgagcccgagaatcacggctacctccttcgcgtctcatccgttggcgaggacgtcgacatctcatcttcggacgactcaacaacgctcgagaccgtcatcccggccaaataccacccttacctggacgtcttttcgaaaacagacgcggacaagctccctccgcatcggacctacgaccactccatcgacctcgagctcgacacccaaccgccttttggaccactctacacactttcagagctggaactcaaagcccttcgggaatggctcgacgagaacctcgccaaaggcttcattcagccctccaagtcaccggctggcgccccaatcctcttcgtcaaaaagaaggacggctccctccgcctctgcgtcgactaccgtggcctcaacaagatctccatcaagaaccgcgcggcgctgccccttattggcgagtccctcgaccgcctccgccgcgccaagatcttcaccaaactcgatcttcgcggcgcctacaaccttgtacgcatcaaagagggcgacgaatggaagacggccttccgcactcgatacggccactttgaaacacttgtcatgcctttcggtctcaccaacgctccggccaccttccagtcgttcatgaacgacatctttcgcgatctcctggacgacttccttatcatttacctggacgacatcctcatcttctcgaacgacccggacaagcacgcggcccaagtcgaacaagtcttggcacggctccggcaacacaaactcttcatcaaggccgaaaaatgcgagttcgaccgcaaccgctgcgagttcctcggcttcatcgtctctcctaacggcgtccagatggacaacggcaaggtcaagaccgtcctcgactggccggaacctacctcagtcaagcaacttcaagctttcctcggcttcgccaatttctatcgccgctttatcccagagttctcccgcacctgcacccctctcaccaagctactcaaaaaggacgcgcacttttcttttgggcaaccagccaaagacgcgttcgccaagctcaaaacctccttcactaccgcccctgtcctcgctcactacaaccccgacgctccgatctccctcgagacagatgcgtcggacttcgctatcgctggcatcctctcccagccgggcctcaacggcgagcttcgaccgatcgcattccactcgcgcaagatgcaacccgccgagtgcaactacgacatttacgacaaggagcttctcgccatcgtcgacagcttcaagatctggcgccactaccttgagggcactccgcacccgatccagatcttctgcgaccacaaaaacctcgaatacttcaactccaccaaaatccttactcgccgacaagtccgctggtctcttgttctcaactcgtacaaatacgtcttcaacttccgacccggcaagaaaaacaccaaggtcgacgctttcacgcggcgacacgactttgaggaggggggtaacgccaaggcgtcatttgaagaaccccaggtcctcctccgcccaattcaggtctcccctctcaacgcggccagcgaaccatcagacgtcgtgacgcgcgtcaaagctggttacgatcgagacccgacggttaagactctactctcgtaccttaggaatcccgatcgccgtcggccgcccgaagtcaacgctcaactcaaaggcatgactctcgacggtgacggcttcctccttcgccacggtctcgtctacgtcccggaagaccaagcactgaagaccgacatcctcggtcagtctcacgaccaccctacggccggccatttcggacgcttcaaaacactcgaacttctgtcccgcaacttctactggccaaacatctctcggttcgtcaaggactacatccgcacttgtgatctctgtcagcggtccaaaccgccccgccaccggccttacggtctccttcaaccgctacccgtccccgagcaaccatggtcctcgatctcactggaccacatcgtcgacctgcccatctccagcggtttcgacgccatcctggtcgtcgtctgccgcctcaccaagatggctcacttcatcccgtgcatgtccaccgacacggccaacgacttcgcacggctctttgagaagaacatccatcggcttcacggcctcccaaaggacatcgtctcggaccgcggcacgctcttcacctccgcgttctggcgcgacgtttgtcggcaattagacatcaagcaaaacctctcgacggccttccacccgcaatcggacggtcaaaccgaacgagtcaacgccatcgtggagcaatacctccggacctactctgactatcttcagaccaattgggccctcatgctgtctctcgcagagttcgcctacaacaacacggcctcgtctaccaccaacatgacgcccttctacgccaactacggctaccaccctcgcttctcggctaccgttcgtgacgtcccggctccagcagcccaggatcatgtcaagcacatcaaggacacacactcattgtgccaggcgtcaatgaagcacgctcacgagtctcaaaagaaatacgccaatcgacggcgctccccagccccagacttcaaagagggacagctcgtcctcctcaaacggaccaacatccggaccgatcggccgagtgacaaacttgaccttaagctcctcggacccttcaagatcctcaggatcgtcggcagctcagcctatcgcctagaccttcccgccacaatgaaggtccacccgacgttccatgtctctctcctagagccctatcacagcaacgaccttccagcccgacggccggcgccgcctccagagcccatcgtcgacgacgatggtgacctacgctatcacgtcaaaaccatcctcaagtcccgtctccatcgacgcgccttccagtatttcgtccgctgggcaggatacgacgccaattcggactcctggattccgcacaccgagctggacgacgatgacccgctcgtcctcgaattccacaccaagcacccatcggcagcaagtactcccgcgcgtcgccaagccgtccgcgccctcgccttgcagcctcaagtcagctctctcgggctcatggcgtcccgctcgtcccagactcctcgcaacccgcctggacgggagagtactgtcatggttcgacctgccaggaacagcaaatccccggcttggggttcgaacccagggcctcagcccgcacgacagaagagaagtcaagcactaccagttccccacccgtcaccggttcgcaactttcacgtggaacctccagcgcgacacccgatcaccaccggccgagtctagacccggcaaccctcggccgccggtcgttctccggcaccagctccgccggcgtgagtcaccagccccaccggatcagtcagcatctccaccggatccgtcagcaggcacagccttccagaagattcttcgccatcacacttcagcctacttaaacccctgtagacctcgagtcgccacctgaatctcaagcttgcctctttgttccccccatcactcgtccttgcccgtcagagctccagcctcccccctgttcgccacttgcaccctaacagccagtcagcaaattgcgagatgatagttctcgcagggaaaagagtaccacgcacaagcaggcccgcgagcgtccagacttcgtcggtgatcaagtcggtcaggtttgggggaataagacgagaccgagatgccgcgcgtgccgttgcgcgggatgttgtccatccaggcgagcagatgacctgccggcggaggaaagaaagggaggtcagcccgtggcgcctccacgagtgcaagctcttgacggagaggttgatattggggccgctgaggatttagctcggccgtcccatccagcaggccagcagaagtgttccatgcataacgttgacggcatcagccccagtgggaggagacgagatggccgaggcgtacaatatgcaccgatgagtagccgcccgccgcgcctcctcaatgtgcaggtgggaggagactggatggccgaggtatgttggcactgacagtccccaaagatcacactgaaaacaaccttcagaaggaggcgtcagctcaacggaagcgcacgattgtatcacgccgttcgctgggaatgagtggatgacttggctgagacgagctactgcgcgcgtgaggttgacgggcagctgtcggtacgatcgttgagatgcgcgctcgcgcaggtatgtatgcaaaatcgctcgtcagagttagccgaacctggtcagtaaaagagcgcaagattccagacgcatcatgagcttataataagggaaaactgcagagcaagcggaaggaaggaggtctgcaactgaggtggcaagaggcctcaggtctaatacgaaagggacagtagacagcgcatcatccagccgggcgagcgcgcgggcggtccgtcagctggattctggagagccgtccagtcgtactttcttttgtgaacatagcaaaagtgctgtttggctcatcctgcaagctctgactactatcaaccggtcacacaggaatacatactgaggcgcactcaaacgctaacaggctgaaccttggttgaggcactgaggagtgaaaaagtgaaagtgatttcaagcctcagctcgctcaacgcgagccctggggtattggttcactcggtcacgtcgtaattttgtcattctccacacatcagtcattgatgatttcggcactgctcctcataacaggcctcacccggcgccggtcggccgactgaccgacttagtgcggtactgtcaccgataaatacattctcgtatgcgttatggccgccttgataagtgcggccatggtgttgtcgatttcaggctagttcttgagtttagcagtgtaccaacttccgtgagacgcaaattggccgaactcagactgaaacaagtagtaaaattatgccaaaagcgctatacttatgatttcgaaaacagtagtggtcggagggtaattcgccgacgccgcgctctcctccatgaagtcgggatgctggtgctgaatcatgagctcgacgtcctcgagagacaaggttttcagggagccaacttggcagctcgaagatcgggcgtgataaaagccagatgaccatgggatgctgccggtaccatcccggcgggtttgagccgggcgcacagtagacgacgccggccgggagcggaggtcgggcgggagcaacgccctcgaccttgaggttcgggcgccgaaccttcgtcatgcccttctgagagtcctgataagtttggcgacgtcgacctgcgacagcagaattctggtcgagaagaaaacggcctagacggcgagcgcgactgggtcccattattttgcgcccccgaccagagtcggctcctcggcgccggcgtcgaccatggccttaacaaagaagcgggaagcgccagtcgtcagccgccctgaagaggcaatacagggcagaatgggacgcacagaagggggtagcacaatagttcctcgtgcatcgaagttacctctccgagtctgagcagcttgaccgaaaattcgtcgagtttggggtaagcacaagcagaatgtctacccccctactcccttccacagtcgctggctgccggcaacaccgcggcgtcaaatacgacgctgaactcatcgacgagaacacggcggccgtcgtgacgccgacctctccgccagtccggcgagggttagcggacttccgggccaagaagccgacggcacgcaaggcctcgtttaccaaccacggcattgccctcgaacgcgcttcgacgccaagttcgacaccctcttcaacatcgtgaagcgcaaggccttctcgcgctggtgccggaagctcaacgacaagctcagtgcgtccgcgaaggcactcgacaagggtcgaccgaagccaaaggcccattttgcgctcagggtctcatggaaggtcgccgtcgactcagacaataaggtagtggaggggggtcaatccgaggctggaccctcggtcagcaaccggttgaggctagacccttgcgccagcatttgtccgaggaggaggaggagaaggaggaggaggaggaaatcgtcatcatgaagggtggcgacagccaggttgccccggccacccccgtcgcgcatatcagccagttcaggcaagggcgtcgttgatcatgcgaaagctcctcctccctcctcccctccgtcatagatttcctcgttcgcccttacacggggatctttgactagagcgcgcttcagctcacgctgaagctccctccagattgcgcccgcgccgcgagcccgcgcaggtggcagcccgccattttttttgcatgggttatatctgcgtatttatctttgaaaaacaccaagggcgaatagttcagtggtagagcatcatctttgcatcaaaacatggtgaaagtcgtgggttcaatccccacttcgtccaatctttttaccctatgtccaagctgatcagccatcgcgctgtgccagcagaacgttgactgcttgagttcagaacttcggaccttcaagcatgccggatccaggcgagaatgtcgggggagcgttagacatggtgcaatgaatcgagctgttgagggtttgacctgagcctggctgaggttcgcgactgagattaggagacagcctgcttatgcgagtggcgaataactgagtgcctgccatcaggcttgaggacgtggcagccgactgttcgagcgctagctggtagctaggtcatgctgacagcggtactcgtcgctgagagtacttagcgcccgcgcctttccttgtgtctctttgaaggtactgtacgcacacgctgagttgtatggctaggtaacggtaacgcaggggtttccgtacatgagtaacgcggtaacgcaccagctcactgtctttatttttgactcctctctccttcggctttgtatatgtactccaggcaaaggcggcaactttttgagggaggggcgacggaaccaaatggcagcgtcagagacctggtttgtacgaatacccctgcgaccgacaattgggtgcgtctgttgatgtcaactaaaacctggacgtcaaaactggcctgatgtctcaaagtgacgccatcagcgaccaagctggcgcttagcccacctgcgtcagacgaaatcgtcgtgcatccagcgagacggctcgagcgacggaagcgccgcgcaagggcgcgcgaggttgccgccgcagaggccatcaccaaggcggccgaggccgctgcccaggctcgtgagaacgagataaattcagagccaaccatcccaaccccgcagcggagcgttagaagcaaaattcatccgcttcatcctcctcctcgagctcgtctttctcatccgacgcctatattgaatgctgaatatataattaacactttcactcccttacatcaattccttaattgtctaacggctatgatattcgcctctcacgcgaagggcccgggttcgactcccggttagggatttttttttttgaccgtgtgcttgatcatcgccggtagaaagccttgcgccgggtacaagtcaagggcctcagtcttactccgtggttcacgctggtgttgggggactgctatcccgcgcccgccatcgctgcgggcgtccagagacgcttggagaagacggaggttattctcgccctgtgctcgcccgcatcgttcaaaccagctcctggacaggtcgaaggacgaccgcatcggcaaggagatctacaactggaactgattgctttcctgcgttggcaacttgtgagtgcttgagctgaccgtgtctccggtcagtcatcggatgtctgaccggcggtacgtattgcacctttcggcagtcggcccttcgtgccgtgctcaatggcctgcaacagtcacctcgaccagccgaggacgtcatcttcactgcctttagcgaagtcatcaaaggcagtcagaactgcaagaacctgctcttctatgtgcgtgttgtagcggcgcacgactcttgatctcgcctgttgcggatgcctgaggtgatctttttgaccctggactgcgcagttccgctcctatctgtgcgtacaagtgcaatcgacggcctggtcagcctttcacctgtcggaaccgccgcgaggcatggccgaagaggtgcgctctttcctcggcaaggccgacgactgaatccgtccttgctttaaggcgactgcgtcttcgacaagatgctgcggttagccatccagaagtggtcgtacgtccgtcgcggtctacctagctgctccgactgctgcttgatctggagtaaacatcgctgacttttgcctgacccaacgaggagggcgcaggcatgactcgctactctctaacaacaaccatgcaggcttgccccataccttgatcaagaccttccgccacctataccctcgccgtcgagagccgacgaacagcagcgctagagccaattgggcgtactttaccctcgacaagctcagctgcgccctgcaaggggccggtacggcagagtcgcctggcccagactgtacaatgatgaagctctacgcatcctgctgggaacctgcttgctccttctccttgatgcgctgaaaggtggccgacagaggcgccttctcccttcccagcattcgtcagactctcttccagccggccgtggcgctcagctcgatctgctcttttacggatcacgatcacaagtgttaactggaaatagggcccttcggtcagtgagctcttactatccatggttaagcctgaataattgaaagctggcagtcgcacgcggccgatccggtacctacttatcgttgcctcggaaggctcagcgtctttgggctaccatgctataatcgcttagccatgttcgcgcaaatcgaaaggcttgccagccgaggcagttgtaggctcatccaacatcaagacatcgaaattagtgaagggctcgtgatcgtcctgaggaaccgtattgaggacccagttgtcgtcgtcgttgtcgtcgtcgttgtcaacaacaatgccttcgacgcgcaatgcgctgacgacggttgtttcgacgattgtcaggtcgcccgaaaacgcgtccttgagcaagctggcgtttcgagctttcccctgtgcctcgacagacaggttgcgctgtcgagttgggcgagcgatgttgttgggtgtggtgatggaagagtcgtcggcacgtacagaaaataacttgcgttgagcttgaccccatacgacctgagcagagtcaggcagttgagaagcttgttcatctcgcgcttgctgctctgtgcgagcttcttgcaaattgcagggtgcttgagcgtcagaccgagtcaaagccatctggagtcgcgatcgcatttacagtttccgaaatctaagtctgttgctccttgcctgaggcaggcccaaacttccttgcggggtcatgtctgcagcagatgtcgtaagcgaccatgtgcacacatgtgcagcctcccgaaactgcaagttattagaagtgacatgtataagcttgcccagaataagtaacgaagggcgcctactggtgaagcgcactgtctgcacggctaaggctccggccgcaggcaagccgccggcacgaccgagtcaccggtcaacgaggcaggattaagacagccaagatctcgacgccgtcccgagcctctggtgcccagccatcttccagccgcccatcaccggtcgcttgctgtgcagtgtaatagtcacgacgtggtcgacatcttcggatttccgtcgggcggtctggagccatctttaacgctgtcacggccggcgagtgtatccaggcgactttgtcgccaacgtcccgggagtgtggcggcaggaaggggacgggcgcgtcgacagcgaagaagttagtcttcgagtgttggcaaactgtgtcttaaaatgccggttgtcgagtccgagatcacctgcgcgaagcggacgtgatcgatgacatattcctcttgtgacgcaccctttctcacgcctgagcggcacttcatagacgttaccctcgagacttcggcccacatgccggccggcctcttcctccccaaatccacctcgatcggtcgtgtcggttcaggcgccggttgagcgggccgcgaagctgattaagagccttgctttctggacctcgatcggccagctcatcgctatgctcgattcccctcggcacccccttatcttggtgacggctgacgaagaccggatactccagcgtaagccgcgcggtggatgttggtcatccggatcgatgagtactggaatggtttcggtcaagcgagagagaggcgtggttttggcatgtatggaatgaggtcgaactcaatctagtagtggccgactccatcttcaggcacatggtgatcagcgatgcaaaatgagggcggaaagtccaaaaaaggtaatcgtagtcagacgctccgccattgagccacccggccctcgagagagggtattggtatccatttagaccagggcaggactcgaacccgcaacctcctgattgacgatttaaccgttggataaacggcggttgataagagcatgggcaagaaattatgatatgtaatacaacgtcacggttagacaacctggcctcagttgccaggaaaggagtcgaaggagagcctctcagcgtgtctattggctgtcacctccgagtcctgtcttacgtcaaaagtgttcaactcctgctagtgacaggccttaagatgcgcgccgtctccagggaaggcttgactcgcacgccacacgctgccgcggctgctcagccgacgatgacttgcgagcaaagctgactgcaagctacgcagacgcgtctcatacaagcgcaggacgaccgattcactggcgagaactgagtttagcgagtgcattgcgagagtttctcattggcagtgagcgagccgcgcgtgcgtgcggctggcgcgcgcgcgagggaaccctcccctcgcctgcgagctgcagctgcagcggcgagccctgacaaagaccccgcaagcaagcgaagagccttgacctgcctctcgccacacccctctctcacacacacactcaacgtattagcaggaccccctccttcagacacctttctccctctccaaaacagcagcacacgatgggcgtcgacgacgaagcgggcgagggcacgacgccagaaccagacatacgccagcagcagcaggctgaggccactgccgccgccaaccgtgcccgctcgtcgtcctcgtcgtcgtcgaagcctcgcatgctcggccaggtcggcgtccagaagtcgaccggcttcatccaccgcatgttccacccgagagaatctgcggccgcaagcagcagcggcagcgagcgtggccttaagctcgacctcccgccggccggcgtccaccacggtggccacggcagcccgcccatcacgcctggctcgccttcagcccaaaacacctctggcccgccttcgatcgccgcttcgcggtcgccttcacgtgctgcctctgtccggcgtgacagcgcgacgacgcccggtggcggcggcgacccgtacgcgatccagccggcccacctggccgatcggctcagtcaggttggcctcaaggcgcccggccggccggcccaccctggctcgcacccgtcgtcgaacgccatctcgccgccgctcgagccctcggttccgccaacgccgagtaccgagaagggccgcttcaacttcaaggacctcgtctcgtctgggcccaagctgagccgcaagccgtcggcctcgtcggcggcctccaagtctgagaagggtggcaagtcgaatgccgggagcgaaaagggcggctacgacggcggaggcagcaccgccagcctgctcgccaagtacggcgtctgcgagaagacggcgatcggcaagggcgcgacggccgtcgtccgactcgcccataagtgggaccggcgcgaggagaagctctacgcggtcaaagtgcgtccgtcgctcgtcatcctttcccacctgagtcttcgtcctcctcctcatgcgaggctcgtatgagtagctcgcctctctcggcggccgctgcggcgtgtcggtctggtcgcggacgagacgagggttgggtctggcttcgtgctcgggccctcccttcacccttaaccctccttgtctttagctccacatgctgatcgagagtaccttctgccgtactttcttcccctcgcaggagttccgcaaacgccgcaagaacgagacagagaaggactacgtcaagaagctcacgtccgagttttgcatttcgtccacgctccaccacctcaacatcgtcgagacggtcgacctcgtccaggacgaatcgcgccactggtgcgaggtcatggagtactgtcccggcggcgacctctacgctgccatcaagaagggctcgatgagccctttcgacatggactcgtactttcgccaggtgctcgagggcatcaactatctccactcgatgggcgtcgcccaccgcgacatcaagcccgagaaccttctcctcgacgggcgcggtcacatcaagatcactgtcagtccgggcgtgcgccgcgagctcgtttgtggccctgctgccggctgacgttcggcctccggctctcgcctgtaggactttggcgtgtcggacgtcttccgcatgtgctgggagaaaaagacacatcttagcaagggactctgcggtagcgagccttatattgcgccagagcagtttgagtcacggggtgcgtcttccggtcgggctcaatgcggacccgttcgctggcctatgatctcgctggcctctgacctcgctgctcttcgcctacagaatacgacgcccggcttgtcgacgtctgggcttgcgccatcgtcttttactgcatgcaactccaggagctgccctggggcctcgcacgcaagacggaccggacgttcatgacgtacgtcggcgcctacctcgacgccgagcactcgcacacgatcccggcgccgatcaatcagctgccaaaggagacgcggcacgtcatcaagcacatgctcgacccggatccggcgacgcgttggtcggtcgaggactgcctgaaggacaagtgggtccagaccatctcgcaaccggatggcacaaacgcggcgccgtcgatccgcgagaagccgctgtccaagtcgcccgccgtcacgccggcatagaaggctcttttcgccgcccctttgcgctttctgcacggagacggaccgagtcgacctgcgccacctctctagcggcgccctcctacgtgcgctgccctgccggttcctgttgcggtcgccgttcgccttccttctcaccgacccggcccgacgctccctccacttcctgcgcccacccactctgctccctcgcactctttttcctcttaccctgtccaaatcacgcccaatccgcatacacttctccggccctgtttctgcccaggcgatcctcgctccttcttgccctcttcccttctaacgatctatgcgcccgtgtcccctgtatccaccaaagagccgaatcgcccctcgctgacggacggccagagcgaacggaatgagcatggtcgtgagaaggaaggagccgcgaggcggctggtatgcggcagaaggcgcgcaaggtagacgggggttgcgtgcccgcacacggaagggtgcgtcgggtcctagcagccagcggcgcccaaaggccgccggaggggagcgccagtcgggaagagcgcagagaaggctctctttttaaatgtcgtcgatgtccgagtcgccgccgaactcgacgccgtcgtcgtcgccgtcctcgccaaaggcgtccgtctcgttgatcttggccgtgtcgggcagctcgccgtaagactttaggttccgggcctgcgtcgttcaaacaacgtaggtcagcgtcctgcccagtcgccggcttctagcttgcgcaaagcgggcgcacctcgtcagaggtgtacttgacaatgacgtcggccttctcgtcctggaattcgcggagcgaaatgaggacaatgtcgccctggttgatccaaacctggaggtggaaggaagaacgaagctcagcgtcagtccgaccgccggattctgcctacacaacgacctccgtccagtcaagccgcacctttttgcgcatcttgccacggatgtgggcgatccgcttctcgccgtcgaagcacgcgcactcgacccggccgttaccgagcatcttctggacctgagcgtactctgcagggttgacgggcagcagggagacgagtcagcctgagcgtccagtatccgccgcctctgcaacgagcgccttgatcggcagccggcgaaagcagcggtcgggcagcggttgaagccgaggagagagagcgtaccctggccgtcctccttgaagacgagctcgcgcttgtcgtcatctccctcgttctttccacgacggcggttctttcctccctgttggtcgagggcaaagcagaggagcagccgtggtcagctctgaaagagtaatggacgagagcccggtgcctcaaaagcgcgggctgcaagacgccgaggcgggcggcgcacctttcccttggcctgaagcgagcagacgagcgggtcaagcgggtcagctcgattattcgccaagccggacctgcacccgatggagcgcaccttgggcatttttgctgtttgtagagtggcaggtggtgtcgggtgacggtgtcggtgtgtggcgggccggtgaggtcagggccttcgccttgtctccgcacgcactgctgggcggagtttgattttcgacggccgtgcaggcgagcgagcgagcgacctcgagcagccggccatctcgccacatcagcacgacctcgacctcctagcaaacgctagcagctcatcatgtgcggccgtttcggtaatgccgtaccggtgagtcccggcagagtggtgttgtgagactcagggcagctcgatctcgctcgcagcacccgcccgcgcgcgttcgtcgacgccacaccgagacgtcgagctaaccggatctctcacctctccagtcgcgtgagtacgtgccctacgtccagcggcactacccagggctcgatgtccagggctgggccaatgaggccgagcaagatcaatggcgtccgaggtgcgtgctcgatcaggctggccgctcgagcccagctcgtcaagaggttgctgcgcctcctcccgtccctcgatgcagctggcgcggccggaaagtgatgcttttgatgacgctgacggtgctggtcgggctctgcgacgctcaggcacaacatctgcccgcggtcgaacgtgcccgtcattcggcgcgagggaggccagaatgtcgtccgggtcatggtgcgttgctcggttagcgccgcccggggccgaccgctcactgagccagcgctgaccatcgtccttccccctttatctctctcgccgcctcagaactgggccctcgtcccgcactggaccaagcacgagaacccgaacgaccggcttaagacgataaacgcccggagcgagtcgctaacgtgcgtcgccttgtgcctgcgcccctcccgcgaccatgcactgactgacctacggctgctgccttcctacaacagcggcgaggaagagcggtcgagcttgtgggcctcgctcgcaccatctaagcgatgcctcatcccggtcgaagggtgcgtcgcttccagatccagcacacgatctggcgcatagccgagcgctgacctctgccgattcgtttcagcttcttcgagtggctgacgaagggcaagggcaaggccggcaagacgccgttctacatccgtaacccagcgccgtcttcttcgtccggggctgtgtcttcgtcggcggctgccgacgacgcgcatgcgactagcgattcgaccgacggccagagccgggacattccgccgctgatgtttgccggcctctgggactcggtcacgtacgagggtgcgcacctgccgacaacccgtcctcttgttgcgcaacgctcagccctcttgatccaccccccgcagagaccgacacgcccctcctgaccttcaccatcctcactacctcgtcctccaagccgctccagttcctgcatacgcgcatgccctgcctacttcggaccgaggttgagatgcaggcatggctcgactgcgagcccgtcccaaagagccaggcggcggccgcggctaaggagggccggaaccagtggtcgaaggagctggcggcgctgctgaagccgtacggcgagacggccgacgacatcgtccggtaagcttgcaaatcaacaactccgttcaaattctttcctgatcgtcgtctcgatcccgcttccctttcagctacgccgtcccgcaagaggtcggcaaggttggcactgaatcggcctccttcgtccaccccgtcgccgaacgcaaggacggcatcgacgcctttttcaagcaggccttcgccaagggtgccaaaccgcttgccggccctggcacagcaggcgcggtttcgtcctcgacgacaatggctggcgggcgcaagtcgaagtcggcctcgcctgagaagaagccagatgtcaaggccgagacgaccccggtcgtcaaggatgagaaggctgccgaggctgctttcgccggcgatcgggcggcggcagccgcgaaaagtggcgcggcctcgaacaagaagggcaagggcaaggcgaaggccaaaaacgaggaggctggagaagtcgtcctgtcggacgaggacgacgaggtcgtcgtcgtcgactcgtcgccgccgccgtcgacggcgcattctccgccgcactttttgccgatcatggtccactcctcgcccgtcaaccgcacggcctccttgcctgagtggacagaggtgcgtcgcctggtcgcttttcccattgaatctcctcgctgacgtagcactctcccttcaggagaccgaccggtcgaagccccgcaggaagtcggatgcactcccgcagaagaagcggaagtcggacgaatacgccccgagcacggtggccgagcggcggaagaagaagggcaagatcgacggctactttacgaaggaggagtgacgatcgaccgccctcacgacctgttgtacacgacgactcccatgcacgccctctttgatgacttgtcatgcccaaccgcgcccttgttccttcgagcggtcattgggttgagcaggattgacgcgctgcctccgccagggagagcggcacgcgaccgcttgcgacataggggctcgagggggggaagagaaggaggaaggccaacagcaaggcgggacagcgcaacacgtgcggggagaggatgagagagagagagagagtcgggttacggggagacaagcagagggagagggttgagcgagcgagaggtggccgatcggagcggcaaagtggagagggaggagtgtccatggaagcgcaccgagacggcgacttttcgaaatctaggagctgtacagcaggcagttggagaagaaagtgagacgggcgcaaacgcgaggccaatcacgagaagttgcgggcatggatgggcggcgttgggcccatctcgatgtcctcgttccggtcatcgcggttacggcggcgagggccgccgagcgactgagcggccgtcggcgtcggcgctcgggtcggcggagcggtgatggggtcaacgggctgcgagcggagcaacagcaaagcgatcagcttcggccgagcaatacgtcagagcgaaactcgaatgacgtacgtcttcgttgtggacgtcctgtgacgggtcctgaaggatgttctcgcggtcgacgaacgagtaggccggcgcgggcgtccgtacggcgccgcggccgaggtcaagccgctccgaggcctgggtcgcgaacgaggagtctccaacggcagtcgcgtggtcggacgaggtctggcggctgaggggcgacggctcggcttggtcctcctcgtatggaacgagcgtgtacttgatcggcacgtcgggcggcggcgttgggtcgccggcggggccaaagattccgacgtccttgagcgcctgcttcatctcgcagacccacttattgtggcgctggaccttttgcgcgccctgctgccagttggtcttgtaagcgatgtcggcctggaagtggagggttagccaagagtattacaacatgggacgcgcgccgagacgcaccttgagcgtcatcttggcttgctccgggaagtcgacaacgttgacgtcaaaggtgccgaggtagtcgcgcttgttggcggccaggaacttgagcattcgctcgcgcagcgcctggatctgctcaaagttggtgtcgtacgctacgtcaaacgaaaagctctccgaggttgggccggaccggcggacgttttcgatgagcttggtgttgaggatgttgttgggcaggaagacgtacttgccgtcgacgcgacggaagacggtgctcatcaggaacatctcctggacgacgtacgagttgccgtcaatgtcgacccggtctccaacgtcaaaggggtgctttgcaaaaatgaaaatggtcgcgccgaggacctcctgggcggtcgtgccgatgagccacgagagaccgagcaggaacgtgccggccgaggtgaccagcgcggtgagcttcgtggtctgcaaagatagagaggggggaggcgactgttagagtcggccgccaagggggtcaagggactggagcacacgaacgatcatggccgtcaggatcagaacgcagatgaggaagacgatgacgacgaggatcgagtcgagccggcggacggcgccgtcgaggtcgcgcatgctggactggagggagaggcgctcgcggtggatgtccctgagaaggagcaggcgcacaaggcaacgatcagcgcgagaccacaacacgagagcacgtccgagccgacatacatgagcgacatctcaatctcgtcccgggtggcgccgccgttcatgtcttggtcgaggacggcaaaggcctcgcgggcgacctcgaggttggggaagaagcgggcgacgtcggcgagcgtcacctcggtcttgccctggcggaacgagtagtagatgcggcgagcgagctggcgcgttttgttggcgctgccgagcgcctgggtgaccatcgactggggcgcgttcggctgaaggaccgacgagcccgtcatctcgctcgcaacgttgccgagcgcggtcgctgtcgtcgcggcagccgaacggacgcccttgagagccttcttgagcacgatctgaggcatctgcgtgcccttactcctgaccgaggcgtcagacggcttgatgatggtgtcggagcgacccatctgcagaagcaaggcatgtggtcaggtcgactggggacagtagatgtcctgacgccgatcaggagacgcacgtcggacgagttctggtagagggcggtgagggccttgatctggaacttctgcgtcgtcatccggtcctggtacgtctgctggtggaagttatctgggggtcgaggggtcgatgtcagcccgagtaaccgaggaggatcgcaaaggagggacgcacaggcaatgaattggacgacaatcttctcgccgccgatgacgcaagagcagaggaagatgccaaagaggacattgctcatcgtcgcgaggttgctcgagctcgccgcgctcgtgctgccgttctgccggcggaggatgagcggcacgaacgcgatccacgagactagcgaccaggcgaaaaaggtgagccacttgcggagggcggcgacaatgtcgacccacgatttgtcgccgccgacgacgacggcgacggttgagcgcaggatcggcgggagcatcatgaaggacgcggtcgcgccccaccacgagccccaaaagaccgagagccagatcgaccactggaaaggaggagtcgagggcagtcaggacgcaaccagttgcagactgaggagaaaaacgcacccagaggaggttgacgccccagacgttagccttcgacttgagctccgggctgcctgtgaggtagacgattccggggatccagagcagctatcggggcggcagccaagaggtcagcaggccggttcgggctgaaggtggcgcgcgtctcaagtacgcaccgcgaggaccgggacgataaagaggatccagcgcgagacgatcgagcgcgtgacgaggtagtagtagagcttgctgaacttgttggtgccagcgtcacccctgcaaagagcgccggccagcgtcaggtcgttcgtctatcggacgcaagcgagccaaaccctcacgaactctgcaaactccaaatgcttgataccgttgttacggacgtcaaagtcggccgcgctgcccggaccggcaagcatgtcccacgacggcaggcgagggtggttcggccgccggctcggcgtcgtcacgcctgaggttgctgccgtgcccggcggcaccggtgggtagccgcccttctcgttgagagggatctgctgcatgccctctggcgccgggtggcggaggtcggtcgtcgacgacatgccggcctgctggtagcctccttggttggggcctgcgagagaaggagcggtcagcgtcacgtctacagccgcgatgaggcgcagcgcccccagtcgaggcagccctccggatcctcctgcttgccaggttcccctccttccggaggctgggcagcagactcatccttctggactcattagacctgcccaggagctgcgcaacggccgtctgctacgccgcagtgcatcctccgtcgctaacccccgacctcgccggtgacccagagaaagaaaaaaaaaccaagagggggaaggtcggatgagaggagaagccgacgtaccgagcggctggttgagatgcgtgcgcgaggcgctcttctcgttcaggccaacgtcctggtagccctcgtagacctcctgttgggcgtgcgggcaggttggaggcgacacacgtcaggccgggcggggtggggcgtcggagggacggcgcagcaagcaggccgagaaggacgcacgtcaaagtcgggccgtgagggcgagggctggatgctggcgccgatggaagggccaggtcggtgactactgtggctcgacatgctgataggtgctggtggtggtcgggtagtcggcgttgctgggctgaaaacacaacgaggcgggtggcgggctcgccggcgtcaccagcagcgcccacggcgacagctgcgcgggcttctgcagccggtaccctgtttcaacggcgcgagcagcggagtcaaaggggcgactgtcggggcggcaggacagcctctcgttcctgaaccagagcgtatgtacaagaagaggggcatcgcataggaggaagcctcccattttggaaagagtgtcggcacgcgtcacgcatgagggcggcctggaaaagaaaacgacagggctacaagggtgaagagagagagagagagagcaaacaggtgtaggcgtcggcgccgagaagcgtgtggacagtgtaaatgaaggggggggaacgagtgagagggcgggccgaccggtgagaccgccgacgctcagagcttggcctcgccgttgccggtagcagcggcgcaagcatccgactcgggcttgtactggtgcttagtgacgcgggcgaggagctcgccgtcagcgaggctgcggagggcggcgttcgaatcgagtccctgctgctgagccgtctcgatgacgcggacggcgatggcggccgaaatttcgcggatgcgctcgatccgcgggtagaggaggtcgtcggccttctcgtcggcagtgagcgagtcggcgagagcgagcgaggcctcctcaatcatccggtctgaaatgcgcgtcgcgcccgagaggctcgcgccaaggccgatgccggggaagacgtacctgccaaagcgaaggccttgtcagcgatatgttctttcgcgcaaagctgaagagggatccgcgggagacgcacatgttgttgccctggccggcgtaatgcttgcggccggcgtagtcctctgggctgaacggcgagcccgaggcaaagatgaccttgccgccggtccaggcgagggcgtcctcaaacgtgagctcgcacttggagagcgggttcgagagcgggaagacgatcggccgggggttgaggctcgccatcttgcggacgatcccctcgtcaaacgcgccccgagtcgtgctcaggccgataagcgccgtcggctcgacaaagtcgaccacctcctggagcgtcttgaactgccggccggcattgtcgtcgcggctgaagaacttcttgtgctcggcgagccggtcgccccggtcgtcggtgacgaggccctttgtgtcgacgagccagaagcgccgccgggcctcctcctccgagacaccggcccggacgaagaacgagatgagctgcttggcgacaccgacggcggccgagcccgcaccgaggaagactgagaagaggacgatggcaggtcagcacgagcacaagaggccaggtcgagatcagccggcgcgacgcaccaatcttctggtcggcgagcggccggccgctggcctcggcgctcttgacggcggcattgatgaagcccgagaggatgacggagccggtgccctggacgtcatcgttgaacatgcagtagtcgctgcggtaacggtcgaggtagaagaaggcggcctcggacgagaaatcctcaaactgcacgagggcggtcgggaagacctcgtggaaggcgaccataaactcgtcgaggaaggcgacgttgtcggcgagcgaccggcgcttctgccggaggccgaggtagagcgggtcggccaggagcttctcattgtcagtgcccatgtcgaggacgatcggcagcgtctgggacgggtcgacaccgccggcagcggcgtagaggctgagcttgccgatcgagatgccgacgccgccgataccgaggtcgccgaggccgaggatgcgcgagccgtcggtgacgacggcgaccttgacgtccttctcgcgccagttctcgaggacggccttgatgttgccggcgtcgttgatcgagatgaagaggccctcgggctcggtgtagagctcgctgaagcgctcgcaggcctcgccgacgtgaggcgtgtagatatagggcgtgatttcgagcaggttggcgtcgacgagggcgtagaacagccgggcgttggtccgccgaagctgggcgaggaacaggtgcttctcgataccagtctgcttgagccggagctggtggagggctcggatcttctgctggtcgagcgactcgagcgcgctgcacagcggcaagtagatgatggcgtcagccggcgggtagacgacaacggcagcaggcagcgacagccgcagcagtaacagggacgtacgcagggacgaggccgttcagccggtggaatgcccggttctcgtgcgagaaaccgaggtctgaaagggttggggagggcgggaggagcggcaggaggtgagtcagttggggaaacggcggtcggacggctagggccgaagggcggcgggcggcaagaaaagggtcaagtggggaaagcgacgaaccctgattcctgagcgggtcgcgctggacggcgagcgagctcgtcgacggctgcgactggcgctgctgctgctgctgcttgaggttggtcggcgacgagctgttgttgaggcctggggcaagggtcggacgagcgggaggggcgggatgtcagtctcgctggggttgggcggctgaaactgatctggctcgcgctgaccgagggccgacgagagctgctgagggagaagggtcatgctggcgagctggcggacgaggaggcgagagcaggagcgggaggaggtgatggtcgtgcgaagcattcgacgagaggcttcccgtttttcaatggttcagtggcgatgtagcgacaggggtgtggggctgctgcgttgacgcttcagcctcgaattaggtccggcgggcctgtcggtcggtagcggcgcaaggcgggacaaccgaccggcggcagagaccaatcctggcaagcggcatcgtcgtcctccccagcggtacgtcctggtaggctcgagtcagggcgtgtcggctgacgttttgctcgatgtcgctcgtacgaccacctcccaaccagtcccagccaggcacgcctctttggggcaagacgagccgcccgtcaggcacgactctcgtgcgctaaggccgacgagacggacccgcgagcgctcgccggcggcttggctcggcgcctcccaatcgaccccgcgcccattcggcagtcgcgccggcggcccggccaattctcgtcccttcagcccattgaggcggcctctcgtgtgcctgcttgcctggtcactggccatagggcccccgactcaggtcctcctcccccacacactcgcctctcagccaagggcatcgaacgcgtcgccatccggcttctactcctccttctcctccaccggcacttcggcgcgacggccttcgtcggaggtctgccttctcgcccggaccgacgctcttttggccctgctgtcggttctccctcgctgacgtgctggccgggttgtcgtctcggtcgtgtcgacgcgctcctacgtgagtcctgctcgacggacgcactccttgccgagctgattgctgaacgcccgttgtcgtcgaccgcctgcgctcatcccttctgctgcttctgacctgccagcgcccgatctttggcctgacaagcgtcgatgccctggcaggccgccgacgaccctgtcgactgctttcgctctcgccctcggcctcggcgtcgactgacgctgctggccgtcgccgcagctgaccaggccgccgactgactggcgactgcaagctcatcatcgatgacccattcgactgcacgacgacctactggcgacgggtcgaaaactcaccgcttcctgtcccttcttctcatcagcttgcgccagagtagcgctcgcgactcttaaggcccgatcgacgcgccgctgcttttgctgatagggcgatgaacgaaatgaccgaccgtccgaccgatcaacaggctatcatcccagcccctggcgtcgaggccagggcgaccatctgttggccgtgagcagcggaagggcgagggcaacaggaagcgagaacgccggccgggtgtcgatttggcctaccaaggcgagcgcagcggcccagaaccagcgacaggagctctgtccttcgcgccagtgactctgccctatccatgaccctcctctcgcccttctcaagcttgttctgagagcctctcgagagactgccctgctgccacgatctgttcagccctgacgacactctgcgagcggtcggaggcagaatcgacgtccctccgagcgcgacgaccgacggcctgggagagaagggctcgcctttgaccttcgaccgtcaagcgctctcgtccctcgccgccagcccaaacgtagacggatggtcatctctctgtcttctgcagcaggcaagcccgcgctgtcctcgacggccgaggtcgaccagtcgggctctcctccgcctccgcctccggcggcgacgacgacggcggcctccgccgacccgccgagctcggcctcgaagaagaagcgcaagaagcgcaagaagccaaagacggccggcactggcgcagaccaggacgacgacgacgacgacgatgccgtcctcgcaaaggccgcgctcgaggccaaggcccaggctggtgctcggccggctaaggctccgcctgtccagcctgcccggccggcgagctcgctctgcatcagtcgcaacaagcactggcggcacatttcggcctaccacgtatgtctgcggcggctcgtgcctctgctgctcgtcatcaggaggtgctgacctgcgactctctttctccttctcctacctgacagggaccttggctgcagctgccggtcgaggtcggtcgacccttttttacgacgtcgaccccgagctcgctcacacgaccggtctttgcatccgtgctgaccttgctctgtctcctcctccacgacagctgctcgagtcgctcctcgctcttaacctcgacccgctctcgctcgcaccgctgccgtcgtcactccggtcgtcatcccatttcctgccgcatgccgccgccggtgcgcttcccgcgccgtcggccgtccaggcaatcaccgccggtccagccgctgccgccgggtcggcctcgtcgtcgtcatcgtcgtcttctgcgcttgctttatcggctgctcccggaccgtctgctggagcagcctcggtcccgccggcgatgcccctctcgaagttgctcggcacgggcaaggagcgcgcatcggcgccgacgccgccgcccatagaccccggcgtcttccggtcgatcatcagcatccggcggctcgtcgacgaggcgtctgaccttgccatcagggcctcgtccggcctgacggccttcaacctgtcggccctctcggcccagtcgctcaacgcgatcgagccgcccaagggcgagaacggccggccggcgagcatgaatgcgacgcgaacgcataggctgcgcgtcctcgcctgccaacgactcgccgaagcttacaagtgggacgaggtggcgtgcagcgtcatggtcatgcaaggcgccacggcgctcgatgacctggcggagaaggtcctccgtgtcggtgcgtcgacctcgctcctcgatgcctgtcccgcctattttacccgcaactgaccgccttatcacttgcccagactcggaaaacattgacgcactttatgtcaacttcttccatgagaagatcccgtcgcgcatggtggccgagaatacgacaacggccgtgctcgaccacttgatctcccgggcgcccgaccggctcgaattcttccggacgcgcggcatcgtccgcatgttcctcgaccagtttaccctcgctgccaaggactttacgcacgccttgctcgagagtcgggccgagcgcaagcgccgaacacccggcaagagcggcaagaagaaggccagaagtaagggcaaaggaaaggcaagggctggcggaggtggcgggagcgtgacgccaccctacgccggagcaacgtcatcaaacgggcacgctgcgtctttcgaggacaactgcaccgacgttgcgatccaccggccggtcgggccgtctccgtttgccgctgtagcgtccgacgaccggcctcaacatccctcagcccggcccgaggctccgctgccaatggagccacagtgcttgttcctccgtgcctcgtcgtacttcacgcacgcggtctggctcatcgagggtgccgcgctcggcattgagggtgttcgccggaacggaacaaacgacggcgtcgaggtccggctctgcaacatcccaggcggccgatttggcggcgtcgaggtgcgatcgttgcctttgactagcgcccctcagagcgtctgcgctgaccccgccctccttgacactttcgtcagaatggtcacaccgagggacctctcggctccaagcaaggcgagaagtaccggatctaccgggcggaatacgtccgggacaagtggaagaccgaagtgcacgtcctcgctcgcaaggcgatccgcgaccacgaacgctttgtggcccactttgaccaggtcggttgccgcctcgacttcagccattccggccctcctgtgctgatcgtcccgtcctcctttggtcgacactggtgcagatggagtcgacttgcatccacgctgccccagacggcgtcgcccctgctgccgcgggctcggcgggtgagcaccagcacgcggccgacggctcatgcggcgcaccggacgcccacaaaggtggtcactcgcacacgcagacgttcacgacctatcacccgcttctggtcgagtcgcactattgcatcctgctctgccacctcttactcggcgatattgccgccgcgagcgatgcctacctccggacgacgcacctcgtcgatggcgtggagggctacccagtcttcctcccggccaggtcaatggcccaagctgagttcctcgagtgcgtcatgctgatcctcctttgacgttttatcgaccgagctgatcgacctgtgcctgcgcttctcagggttttcgagcgcctggctacctggcgctacgcctttgcgccccgaggcaatgcagccggcaccaaagccattctccctgcggctccaccgactatcgtcgagccgaccgccgaaaccgctgtttctgaaacgaacggcagcgaaagcagccacagcggcctcagccatccagtacctctggccgcctcaggctcctccctttcgtccgtcacgccggactatggagcaagtggcagtagtagcagcagcagctttgccgggccgtcgtgcgcctcgtcgtcgacttcgtctcacgttggcgaggctggaggcagcggctctggccgccagactcccgtctcgtacgctggttcgagtaacagtgccggccagtcctcggcctctccgacgcagaccacttttgccgtcaccgacgcccagcaagccgaggtgatcgagccacccaagccgccggcgccgttcgatgacccggccaggcacctcgatgccgctcggtcgatggtcatccgtgcgctggccaaggccaaagagcgccgacagcgccaggccgagaaggttgccgaagccaagcggcgtggtaagaacacgtcgttctcggccatcaacatcccgctctcgggcccgcgcgttgaggtgcgctcgatgccctctttcgatctcgcttccgcggtgatgactgatctggccttccctgccctcgccaggtgatcctgatctggatggcggcggtcgtcctgcccgacctcgaggcagccaacggtctgccctgagcgacttgaggcctctctgtcagttctctgtcctcccgtccgagtgcgccgcctctaatatgctcgtcgtccggaaaacagggtcgggcgcgctcgcaaaggggggccaagggcgaggcgctggggctgccggcgacttgccatggagcgagacgaccggaggacaggacgagggcagggcgatagcgacaagatacagaggcatcgggcacgaaagaccggtcttacaggaggcgggggttgaggacgagcggcaggcgaccggtggccagtcgacagcctgctgctcggcctgctgcttggcctctacatgcgttttgtggttggtggactctacggacggacgggtggctgagcgagtcaagaaggagcgtacagagagagcggaccgagagagcgagaaggcaccaccaccgccaccgccgtcatacgaccagctgccgttgctgaatgtcgcgttgccggcgtccatccgctcccagcggcgggcgtacgccttcgtgctcttctgcaagttgcaagatgtttggatgggaggagaaggagttagcggcgtgtaagagagagcagagatgagggaagcggttgctgaagaggagggggcggaccttgcggttgcgagcccacatgcgctcgatggcggcctggcggggtcgtcaagaggcagatacaagcaacaaagcgatcagtctgagctggagtcacctgctgagcatctgcacctggccaacgtacgtctggagtcgcagcagcaggccggatcaaacgcgtcagcatgcaagtcgacccggaaggcgcgcacaatgggaggggaccgactgagctgctgctgctcgcgctctcccttgagcttctgcttgcgcgcggcattcagccggcgatcctcggccgttgagtgggtgaggacgtcgacgagcttggagaacatgattgaggggagtggtgggcgagacgggatgggagggccggggggtcggtcgggtgtcgggctgaagaggttgctttgtccctgggctgcctcttaagaacgggctctctcggcgctctccaggcgtcgctcgtcagctggagccgaggatgagcgtcggaaggcaaggaaggtaggctattacggcggagcaaggcccgacttccggcatcgtcgtcgggagagaagattcggaaggagcggctgccggcctcttcggcgatagccgttgcttggactggccgatactatcacacgtgcagcaacgtcaggcggcgagcgtcgtgtccgacttgagtcgaacgctgtgcaagatcgtctggaacaggctgaagttggtggcgatgggcagaggtgaggctgggtaatgaacaccatgccggctcggctgccggcttctcacccaccgcgcgcactactgcttgccggccattcttggcccgaccgatgcagacaataacaaagcctgaaggacaccgcactcagacggtgcagcttcagacctacttgacgcctccttaccgcctggccaagaggggcttgttgcagctcgacaaagctgggactgcgcggatccgaagtcggaggtcgggccgaatccgagagagcgcaactcaaggctccgcgcacgacccttacgggcagagagacggtgtcgggcaaagacaggcatgggatacagtgagaatagggagtacaggaaaggctggcctgtgttcagatggcaggggggagggcagggcggaaggcagattctggtcgagacgagtcctgccgctgacgatgcgcactcggtcaggtcatcctcatctcggtcaggcacgaaggcatccagcgagacgaacttcttgaacgaggtgagcaggcgagcttgacgtcagagccctacggtggaccttgttgagccgaggcgatggttgcagcaggcgagacgagacgacaggccttggcgcagtcgtcggtcaacgacggacgatggtcgaccgtctaagcatagccagccgctgctcccccggcgtgaccgcggtagtacgaggccatggccgggtcacctagcagccgctctttccgatctggatggcctcgcgggagggcgtttggaactgcgtgagtgcgaggaggtggttagcttcgagatgactcggtcacgacgagagggcaagagactgacagcgcttggccgattcggcctgcctcgcttcggtccggcgcttgaggtcggccgtcttctcctcctggatggccttcttgagctccttgcgtgtcatgctaaccggcgagggcttgccgtcggtgcttgtcgagacgagcgtcgaatcggaccgggtcgaaagagtgtttgagatggttttgaagagaccggtcatgctgatagacggtgagatggtggtgagtggtgaatgagaacaagcgtggagcccagctctgtcttgaccggccagaaggagtggagggcgggcgccatgccggttcgtcagtcggctgccggctaccactcccaccgcggccggccggcatctaggcgcgcctgcagccttcaggactgacccgctccgtcctttgagaccgctattgcgtaatgcagttgggaccgtcaggtcgaggtgcgcaggtcgcccaggctgttgcgactaggcactgccgttcgactcatcctgccgccgcacgaaagctatgtcggactcattcaagatgatcccgtagcggcgtctagtcgctacacgtgtctaggggcaaaataaggggagggataaggtggctccgggtgtaggctacaggtgggggttgcggcaagagagaggaagaaaagcagaaagcaagggaggggcgacgcaaagcaaccttttagaaggccgacatgccgcggaaggcgcccttgatgtcggcagcgggcgagccgacgggcgtcttgccgacgccggcagccttggcgaacgcggtgaggtcctccatcgacccgcggcgggagacgttgggcgtggcgagcggggtgggcatcggggtcgagcggtcggtcggcctggaaggggacgaggcgaatcgaggagtcagcgatgatggacccagaagccgtcacagatgtgatcgatggcgactgactgctcaatggccaggtacatcacaccgttttcccaatggcacgcaacgtgcgagaggtcctcgacgaggaagtcgggcttctccttctcgagagactcgcgcgtgtgcgacgtgcaggtcgcgagaacgatgttgccggcggccttgccggaccggatgccggtcggcgcatcctcgatgcagacgcactcctcgggcttgaagccgttgcgctcggcaccgagcactagcgagcgggagggagggagaaggggaggggtcagtcaagaaaggggcaagtggggactgcacgcgcgcgagggagggaacgcacggtacgggtcgggcttgggcttgccctgcttgaccgactcggccgtgatgaagatcttgggcgtcggcaggccggcgagggggatcgcctgcgaggcgtagaagtgggtcgctggagaaagaggaagtttggtcaggagggaggacgtcactttggttggccgttgccgccggcagcggcgcgcgcggggaagggcgccgactcacaagacgtgcagatggcccactgctcggcgccgccgcgctcctcctcagcacccgccgagagttgggcgagcagggacttgacgccggggagagcgacgacgccgccctcgcccgaagggccggccttcttggcggccgtcaggatggccacctcgaagcgcataacttccttcttcaaaagctcctcgtcctcgatcagacaccatttccgcagggcgtcgatagtgcggtatccctgcgttgcggcgagaggcgttgcggcgacaggagagggttagcccgggtacagggctaaggagaaagttgagaaacggaagaggaggacgcacgtgagccgacttgaggatgtggtccagatcaatgaaggggtaggtgatcttcatagtctctatagagaggagaagaggtcagcaggcgaccaggagaaagtgcgaggatgtgagacgcaccccaggcgacgacgacggccggcgacgagtcaatgagagtgccgtccatgtcctggcgcggtaggaatagtacacaaagtcagcgcttggaaacgggaacgacgccagaagtagagcgacgcacgaagagcatggccttggggctgatcatgatggtctccattttggtcgagcgggtgtgtgaggtaagtgaaggaaggtgagggaagtggtggtagtcggagaggcgagggctgaagcggcgacgttctcttgaaccggtcaaaaagcggcagaggagcaagcaggaagaccgctcgcccgcgtcgcccgctcggcgtcgtcactgctggtggggttggagcgagtgctggggccctgaccgagccgcctggccggtcgcccgaaaggctggccgcaggggtttctcggccgggggtctccgcgcaaagcaagcaaccgccggccggggcggcgcagcgaggcaggttcgctccctccgacgtcagagacctcgttggctggcaggagccgacccgccttcccgcaaagaatctttcgcaaggccaacccagcgacccaccacgaccccttgcccttacccacccactctacactctacaccactccctcgcctactcgccgagaagcccttctgctcagcgcccagcacttttcagcccacccgcgcaagccactttttcagcccacccaccccctcttccctcgccatgaccaccaagccgacgcccaaggtctcgccgaccgaggagctcaagctctcgtcgctccagctccgcgagtcgatcgacaaggacagccagcaggccggcgctgcctcgccctcgggcgacgggcccggcaactcgctctcaaccttcccctcgccggcgtcgtcgcgcccgccgtcgccgatgatgcggccccagcacctgccgctcaacgccctctctggcctccagagcatgtcgtcggccaactcgccggccaactcgggtcctccttccgcctcgggcaaggacgacgacgacgaggacggccagccgccggcgcccgtcaagctccgccggggttcgtcggtcggctcgcgacccaactctgcgccgggctcgcgcaggggctcgtcggccaacctgcctaagatggaggccatcgccggctttggcggctcggccgcgccggccttcaagccgaagaccaaggcccgcatcgcctgtgtcggctcgggctcgtgggcaaccgccctcgcccggatcgcggccatcaacgctggttccaagagcgacgtctttgagaagcaggtcaacatgtgggtccgcgagaaggaggtcagtcccagtctcatcttctctgcgcctcgcgatacgctttgctgaactcttgcttctcgcaggtccccggcggaggtctcctgaccgagctcatcaactctgagcacaagaactcgcgctacctgcccgacgtcgagcttccggagaacctcgttgccgtccccaagctggccgacgttgtcaaggatgctaccctcatcatcttctgcgtccctcaccaggtgcgcatccgtgtctttttcattcgccgacgaaagagaatgagatggtgggcggccttgttgcaaacagacctggagactgacgtcagcgccttgctctcttcctttaatttaatttctctccttgacctcgacaacgacttcttccagttccttcctcccgtcctcgccgagctcgccaagcccggcgtcctccacccggaagccaagggtatctcagccatcaagggcattgaggtccacggtcccgacatctacacctacccttggctcatcgaggagaagctcggtgtcccgtgctcggctctcggtgcgtctccttctccttcgccaacttcactctcgactctaagactgacctcctgctttcgcattctctaggcggcgccaatattgcgctcgaggttgccaagcagcagttctgcgagacgacgattggctgccccaacacggaggactcggcggcatggcacgccgtctttgacacgtctatgttccgcgtccacgtgatcgaggacgtgtccggcgtctcgctctctggcgcgctcaagaacatcgtcgccatggccgccggttttgtcgacggcctcgagctcggcggaaacacaaagtcggccatcctccggatcggtctcatcgagatgtcgaactttacgctcgagttcttcccggacgcctcgcccgacacgttctcgcatcactcggccggcgtcgccgacctcatcacgacgtcgtttggtggccggaaccgcaagtgtgccgaggcgtttgtccggacgggcaagtcgtttgacgtccttgaggaggagctactcgacggccagaagctccagggcgccgtcacttccaaggagatttatgagttccttgaggcccgcggccggctcgacgggtgcgtcccatggctttcgccttgcctcttgattgctacatgctggcgctgacctcccccttctcctcactctgcagctacccgctgttcgtcaaggtttacgagatttcgtacaagggcctagcccccgatgctctcttcgctggtctttgattccaccctatccactccgcacaaacctgccacccttcacccttgatgtagccctagcatttctgcctttgcaggacgccctcccctttatggacagtatcgtttccaagcctttgttttcgagccctcgctgcgagctgctttgaacgtcccagactgtactagatgatcaagcactagatgatcaagatagatgcgttcagcctttattttcgagcagtaggagagattcgagcccatcgtacaatggtgcgaaggcaacgtttgggcgatgacggcctgagtggcgtcatcgactgcagtgtagacgtgctgaagaggcagggaggaggccctgtgaaggactggccacctgttctacggatgatcccctgcttcccgttaccctgaccggcccttggtcctcctgagggtcgacgacgacgacatcgaatgctgctgcgcgacaattgcactcgggctcgccggccgaaaacgcacgagtcaaggccgtcacgattggatcctcctcctcttcttccttcaccaccatcgctctctctctcccgaccaggtccggcctcagcatgctacagagcgtgcgattgcaagacggctgactcgcttttgcctctcttgcccgccgtacgatccggtcgctgcgaccgcctccgcccactgccgaccgtctgctcgcccgtcattgccgcctcctccctccgacggccgcggaccctcctcctccctccgcccaacagtctcacacggaaccatgtcccagattcgccagcccaagcagaagctcacggtccagcaggccgtcgccgagctcgacgacaagcgcgtcaaggccgtccggcctttggtgccgcctcagatcctgagcgaggagctcccgctcgacctccggggcgctcagacggttctcgtgcgttgtgcctctcccttcccgagctggcccgtcctgacatgatagcactgctcatttgtaggagggccgcatcgcgactgacgacatcatccatggcgatgacgaccgcctgctcgtcgttgtcgggtgcgtctctcttactctggtttcgtcccggctgctgcaagccgctcgccagatctgacccttcccttccgctctcgcccgcagaccctgctcggtccacgacgttgacgccgcgctcgagtacgccaagcggctcacagcctacgctgcctcagccaaggacgacctccatatcctcatgcgcgtctacttcgaaaagccccggacgaccgtcggctggaagggcctgatcaacgacccagacatgaacggctcgttcgcgatcaaccgcgggcttcggatcgcaaggaagctcctgctcgacattgccggcatgggcatgccgaccgcttgcgagttcctcggtctgtccctgcctttcttcccttagcgtccttctcgctcaagcgccgaccgactgacttcttgacctgtgcggcttcagacaccatctcgccccagttcacggccgagctggtctcgtggggtgcgattggcgcccggacgaccgagtcgcaggtgcaccgcgagctcgcgagcgccctttcgatggccgtcggcttcaagaacggcacggtgcggcccgattgccttcgcaggcgcctctcgacccgttcaagctgacgtcttcccccctcttcgcacgtcacaggatggctcgatcgacattgcggtcgatgcgatccgtgcggccgcctcgtcccacaccttcctctcggtcactaagcacggcctctctgcgatcgtcgagaccgagggcaacgacgcgacgcacgtcatcctccgggggtcgaacaagggccctaacttcgcggccgagcacgtcgcggccgtctgtgagaagctcagcaaggcgggcctcgtccagaaggtcatggtcgacgcgagccagtgcgtcgctcgtcgaaccctccgtgtggagtcgaacggcttgctgaccgctcgtgtctttcttgcagcggcaattcgtccaagaagcacgagaaccaaatcaaagtcgccaacgacattgccgcccagctcacctctggcccgacctcgaaccagatcatgggcgtcatggtgcgcttccgtccttccagtcggttggcgagacgagtctctaacgcttggtccctgcccctcagctcgagagcaatatcaacgagggccggcaaaacgtcccggccgagggaccggccgcgctcgcttacggcgtctcggtcacggacggtccgtttcccctcccactggccgcccttgtaacgccccagagagctgaccctgtttccgctcactcgtccgcccacccgccagcctgcctctcgtgggagcagaccgtaccgtgtctcgacgccctcgccgccggcgtccgcgcccgccgcgctgccatcgcctcaaagcgcgctacgcggtcaaactcgccgacgaacgctggtccggctgcgcctccgcctccgcaggagggcggcgatgtcagcgttacgggctcgcaggtgcctggcatcgctgcctagatggaatggtgaggttcccaggttgtacgaggagaaaagcgagggctctgtcgctctcgaggattcatgttgactgcaagagaaattcgtgaaggagcactcagagtcatgtcttgagagggcgtctagcaggcaggcgcgaccaatgcgcaccgcgaaagcgggcatctcgacctctggccgttcgagaacgaagaaggatcccgctcggtgagtgaggaaggcgacgtataggcgcgcaatgacagcaccctaaggagaaaggcgacgcaggcctacgcctactgctgagtgaacttgaggagctcgccaggctgaagcatgagcggctcctcgatgcgtgcgatgcccttgccctgcagaaggtccggtgaagctcagtcaacaggacgatggccaaggcaggccggaagcaagcgcgccgagcgagacgcacgtcctcgaaagcgagcatcgtcgggatgcacgtcaggctgtaaggcggtgccctgaacggcgagtggaccgatcgccactggtccttcgtgccgacgtactggatgtgaacggctggcggttcgtgtcgcagaggggaaggagggcagggttagctctgacgtaaggcgaggcaagcggcagcacagagaggagtgcttgggcgaggacgcacttggcttgccttcaccctcgaacgcctccttcacgaatggcatgacgttgacgcagtcctggcagcagtagcgacaaggggtcagtacgacgcctgctccatccttcaggcttctcatgacgcaccgggcaccacatgcgctcctcgtcgccttcgacaaagctcgagaggaagaggatgtacgtccgccggccggcgagcgagctcatctggacaccgtccgagagcatcttgaagtttgccggggcgaggccggtcaacgggccggtgggctgctggatcatccttgcgattgcgagagggtgaggatgggaagttcaggggcgagatgatggtcggagggacctgctggcgagccatcggcgctcgccgtcgccgttgctcaagcgttgccttcgtaccattgtacgatgggctcgaatctctcctactgctcgaaaataaaggctgaacgcatctatcttgatcatctagtgcttgatcatctagtacagtctgggacgttcaaagcagctcgcagcgagggctcgaaaacaaaggcttggaaacgatactgtccataaaggggagggcgtcctgcaaaggcagaaatgctagggctacatcaagggtgaagggtggcaggtttgtgcggagtggatagggtggaatcaaagaccagcgaagagagcatcgggggctaggcccttgtacgaaatctcgtaaaccttgacgaacagcgggtagctgcagagtgaggagaagggggaggtcagcgccagcatgtagcaatcaagaggcaaggcgaaagccatgggacgcacccgtcgagccggccgcgggcctcaaggaactcgtaaatctccttggaagtgacggcgccctggagcttctggccgtcgagtagctcctcctcaaggacgtcaaacgacttgcccgtccggacaaacgcctcggcacacttgcggttccggccaccaaacgacgtcgtgatgaggtcggcgacgccggccgagtgatgcgagaacgtgtcgggcgaggcgtccgggaagaactcgagcgtaaagttcgacatctcgatgagaccgatccggaggatggccgactttgtgtttccgccgggccagcaagcagccgtcccatgcgccgccggccggcgtcgtcgttgtcctcgaccgacagggccagacggtctcaaacgagcaacgccaacagcgtgctgccgcccgacgccctgctccttcccgagccaatggttgagcaagcgcggggcgaggccgatggaggtcggccggtgagcaaccaaagtgccgggggatgatgggcaggaagggcaaagggaaacgagagggaagataacgggaaggacgtccctggatggtttgggcgagcggtcagacgagcgcagaaaattggacgcaaaggtcaaggttgcggttgctgcctgggggttggtgcgagtgagcgtggtcgagggccgcgctcggatgatgagcggagagcgccgctggcctacctatcgctttcatggctgctgctgcccttgcgattgctgccgctgctactgtccaacatgggctcaaagagccggtcgacgagtggccgaggggagacaaatgctttcgtcgtcgtcgtcgctctcgttgagcgacgagggaagtcagatgaaagcgaattagaggtggagtcggggggactggtcaagccaggattttggatggcgttcctggccgactgctggctggacgggcatcctgttgtggagggaagcaggaaggatgagcgtcggtcaaatgaggctgaagcgggaagggaaggcgatcggttgcggacgagctcggcttgggcggacatcagcaactgtttgctttgcttgatcgtggtaagagggtgtgggtcagcattgatctctcttcctcggttgcccatcccgacggtcttcctgctggtacgacggtcgacggtgaagtcgacgatgatggcggcaaggaggggcagcagcctcgtctggcgggcaagcgcagcaggacatcgacctttatcccaggagggctggcctctcgtcggatcctgttgatcggacgtctccttgcgccgaggttatcccagaagggcgcaagtgttcatcagagtgttcccgtctcgttggccgaggaagacgtgtcgcttaaatcgcccgaggaggcctcgacgcaggcgcgggcgacccttctcggcgccttttcaccccccaacggcttggataacctgcagatgagccggcagttccagaacgagcgttcgtacccttatccaacaggcatgatccgagctcgttcaggattgacgagtcaaggaaccatctctcgcacccgccggttcgcccgtgccgaggttctgtcgtttgctgcgcgcgcgctcgctcgcgcccggccggccggctgacgactccaccgtttgctcgtccctgcccttctctctcctcctcctcctcctctatcctcatccgtacaacagtctcgcaagaatcaaagatggccgccgtcagttcctctgcctttctctgcttgccctgctctcgcccgcttccgccgaagagccaggtcggtcacgcgctggctcggtccgtttggccggggcctcggcgctcggcctgccttggcctccctcccctcgctctcgccttcgggaaaaggaccgctgggagatgggccctctcgagcgaacgacggttccctgacgccttgccttgccctccgttgctgctcctctcttcctcctctttccctccgaccatcgaccgactcgaccgacaccaacctgaaccgactctcgccctctctcgctcgctcgcgtcgatcgacaccctccgtcgcccgccgactgcctgccgtccgaccggaattatgctcacccaacgccagacgcctcctcagctgacgccgctcacggtcgtcgacccggcgagcgaacggacgaccgtcagtccttcctctctctcttctcgctcttgcatctcgcctttcaggccgacgggaggcggggccagcgttggcgctggggagatcagcgtcggtcggccgggctcggccgccggtcactggcgcgcgcgcactgaggagcgaccagccggtcttacttgtcgctcgtctgcacgctcggacgcgtacgagtgatcgagcatgcaggcaggcagtgagcgagggccgtcctgactctttctgtgaagcaagcagcgagagggaccgaagggctaggcaggcggtcctgcccgacgtcaaagcgagagacgctgacccatcgtcctccgtcaccgccgctcaccggccccctcttcctcgcccctccatctcgttcgcccttttcgctcgtcgcccaaacgctgcctctactcgcggccgcctcctgcttgcgcgccgacctcaactgccctacgacgacaacgaacccatttgcttgcttcggccgccatctcccctcgctctctggcaccccactgcgttcctcgccatcgccccttctttctgatgctcgcctcggacgactcgactcgccagggccagcacacgcccgcctcgcgtcggacctcgccgccaggcgcgcctcccccagcggcctcgacgggcgcctcgtcgcgcgcgccgtcgacgaccggcagccggcgcaacaccggttcctcctttttcaccaagcgctccgcctcggtctttacctcgccctctggctcgcccggcgcctcgagcccgcatacagagaagcacggcggcttcttccatctcggtggctcgcacgcgaaggactcggctaaccacgcgcaatacacggcatccgaggcgccctcgcgggctcactcgccaaactcgacgcgccatgcgaagcaccacacagggccgctgcacgatctcaagcgcttcttgcaccaccatatcggccactcgcatccgcaccgcgagcacctgtcgggcttgacggcgcttgatgccggacacggtaacgacgggccgagcgggcgccagacaggcaagacgtcgaggaggggcagctcgagcggcttcgcaagcggcgctgtcagcccaccctcggccggcggctcgccgctcccccaagtgcccgagcggtcgttccaggccgggcgcgagccggcaaccgacggcaacgtgggaggttactcgccggcgaaccctccgccgttgccgagctcgctcccgactgcgcccggaacgcctggccgtgagcgctcgcgctcgtccgcctcgctcctccacccttcgaccgcgacggccgtcaagcccttcgcgcagcagcagcagcgggacgggacgcacacgccgacctttggaggccacgtcaacacgcccgggtcaaacagcgcgctcgcctcaagcctccaccaccacaacccgcacccgtcgctcgccaacgcgacccaagcgcacctcgccaagaagtacggaaagtggggcaaggtcctcggctcaggcgcgggcgggactgtccggcttatcaagggcccgtcaaagtcgggcgcgaccgtctatgccgtcaaggagtttcggccgaagcggctgggcgagagcgagaaggagtaccagaagaaggtgacggcagagttctgtgtcggcgtcacgctcaagcacgtcaacgttattgagacggtcgacattgttaacgaccacggccactacttcgaggtgcgcctcggcgcccttggtcccgcttcctgtctctagcggactgatggggctgaccccctctcgaatcctcgcgccgcatgcaggttatggagtacgcgccatatgacctcttttcggtcgtcatgtctggcaagatggcccggcccgaaatctactgcgtcttccggcagatcatcgatggcgtcaactacctgcacggaatgggcctcgcccatcgcgacctcaagctcgacaattgtgtcatgacagccgccaacgtcgtcaagattatcgactttggcactgcgaccgtcttccagtatccgggcaagggcgaggtcaaggcaagcgggatcgtcggcagcgacccatacctcgcgccagaggtgctcggcaaggaggagtatgacccgaggaagacggacgtctggtcgcttggcgtcatgttcatgtgcatgatcctccggtgcgccctctttctcttttatcttttaatccgagaggctgctgataccctcctcctcccaccctggcagccgcttcccctggacaatccccgacgccaagacatgtgcgagctaccgcgtgcgtttctctccctcagtgccgtcttacgcgcccgagtcactgacctgcttccaatccccccttctcgcctggcagctctttgtcaacacacacccgcagctgacggcgccggccaaggtcgtcgagcaccaccaacacaagcagccggtcgccaaggctgtcccgcttgaggaggccggcctcaagggtgtgcccgcgccaagcctttcgaccgtttcgcgctcgagtgcgtcgaccgccgtctcgacctcgaacaaccctgcgggccaaacttggcttccggccgagagcggcaccggcgccggcgtgctcagccaggacccggccgaggcgtcatctgggagcgagcacggcggcaccggcagcgaggcctcgagctcgacccgctcgaccggcctcgttccctcaacgatcccgacggtcgagacgccgatggagatggacaagagcgtgctcgagatggaccgtcccaagccgtttacgacgagcgagccagcctcgcgcttcgcgacgcacgctccgccgccggtcggcggtgacggcgggctcagcggcgcccttggttcgctgcacatgtcgcagcgcgacgactttacaaacgacctcgaccgggcaaccgccggcttgtcagccgctgcggcggccgaggccgtcaacgatcctgcgacggcggctcgccggcagcgggcggcgacgtcgcctgccgagcaccggcctcccaccggcgccgacgagagctcaacccctcgggccggcgccgcccacctcccgccgccatctgcgccctcgccccggccgacgccgtcaagcgctgcgcccgcaaaaaagacgagctcgatcgttgccgcccgcgaggccgcggccgagtcgaccggcgtcgactccatcttccggctgctgccgcgtgagacgcggccggccatcatggccatgatgacggtcgacccgctgggtcggtgcacgctttctgacctgctcgagggccggggcaaggaccacctccgatgccgctgtggcggggcggagtgcggcggcgggatgaacaccccgcccaacggcagccgcaacggaagtacgacgtcgtcaaacggcttgagcgagcatgcgttcaccaccgctgccggtgatgtcgacgaggacgaggttgacgacgtcggcgacgagtggatcaagtcgatcggctgctgctcgcacgacggcggcagccggccgccgcacgagcacgtcaagatcgaggtcgaggagggcccgacaaaaaagaagcggatgtttttccactagatacgcagtctctgtcctttgctcctttgccgctcgcatctcgctcgtcctcccttggagaccctcctcgctctgtccagtatcccctacgcctgcccccttcgcccttctcccttctcttcttgctcctgtcgctcgaccccttcgcatccatctgcgactctctctctctttttctctcgcccttgtactctccgccgcgaaccagcttccgcccctgtcgaaaagatgtagcaattgtccgaagaaccgcgcccctcatgaatcaggcttagtaatgtgcagagcgctcgcagcggccgcctccttgcgccgctggacctcgcgccgccgagcggcgtagatcggctccatatctgcctggtagagctcgcgcacgcggctgtcagcagaagatagccggccaggtcagctaagacgcgcagacgacggggctaggctgcggagacggaaggatgcgggacgtacgctcgatgccgtttccctcgctcgtgcgccttgacggcctcagctggttcggcgtcgggtgaggccatgataaagtgcggctcggcctcggtcgagcagagctcgcaacggagacgtaaggttgtcgtcgggagcgagctgcggagtgacgagcttggcgtcagcttgcgactcgcgcttggggcgtcgccgtatacttacgacttggcgacaggttcggaaactggcggtagcagcttagctgcgagctcgccaccgaccgactcgcgagatggtaatgggcggccagacagaaatgctcaaaggtgcccgtgtgaatcagccacgaggcgcagaggctggaagggaggggggtgacgcaccatcaacgacgtctagggcgggccggaggacgctgtcgtcccatcgcgagaggtctgcagggacggccaatcagttgagcctgctcgtagtgcagacgccagagcgactcacctgtcgcgtccaggagaaagaggccctcgtcctccgcggtgacgcgctcatcgaccgtgtctttgagcttgccggcgatccacttgacctggcttttcgcgtactgccgggttgagatcttcatgcgctcgatcgcctctttgaaggctggcagatccttggccgccgccgtcagctgcgccgtcggcaagggagcgaactccttgtagccgatcgactggaagatgcccgacacaaggtcctcctcgggcgcctcgggaaacgacgtctggtaggcctctgagatctcacgcatgtctcggagctcttcgagaaggccgagctggaggtggaaaggcggcaaggtcagcaacaggttacggtcccatgggaaaggaggggcctcacgtcgaccatcttgtcgacccgctcgtcgagccgcggattcaggacttctggccgggcgtagagccagaggatgagcgtcttgtacctgaagatgccaggaacgaatcagcccgatgcaagggacctgccagtgcctggtaaagctcgcacctcttgtcgccatcgctcggaccctgcgtctctgcccgcttgcgtgcctgttcggcccagagcgcactctctcgcgcgccctcattccagacccgttcgagcccgcgcaggactttgcgtgtgtcgcgccaatgccatttggcagccatcagagggtcgacccgttcgagaagctgccagagggcgagcgactgctcatcgggcggcttgagcgggagcgacgggagcgagtagaggagcgcgtgctgcgcggccgtcagtggctcgggcagggcctcaaggaaggctggcaaattcggtgacggcgaagggaggaagggtacatgctcttccaagacggccggcgctgtgagcgacgttgagacggcgagcttgccaagagggaagagcaggtgctggacccagtaggtcgtcccgcccgtcacgagcggcaccgaggcctggccgtgtagctcgtcgacctgaaggacagagcaccagcaaggacaggggatcaacaggcatacgtgtccagacctgcaaagttcggctgatcccgcacctcggcgagggtcacctcgacccagcgcttcatcccccaccccttctcgccccgggggtcgacaacgccaatcagccggtgcttgaccccctcggcctccgcctcggtcaccttgttggtgatgacgtcgagcccgcgaaagatctgcattgagtcggcattgatgacctcgccagaggtccatcggctgctggaggaggtaggggagctggcgttcgaggatccggtatcggcccagggggggaaaggaactggatgcgacccgagctgctgctgctgctgctgcctcgacctctgtgcgaggtgcttggcaatctcgatcccaagcttcgacttgccgacgccggtcgtgccgacgatggcgatgaccgggagctcgctcgtggacgctgcgtccgaagacgtggtcatgctgcgggtcaggcgttggagggcgggtcggcgggtcgggaggcggccggctgaactccagagcatacgtcccgggctcggtcgtggtctgctccggaaggtgcccaggcgaagcggcttagctagcttcggtccgagctttgctaaggttaagcaagggtgatgggcggggtcgaggcaggtcgctgggcgctcgactccgccaacggccgcgaccctggcctcccccccgttcgcactgcgcgtgcacggggctacttacgccttcctcattctttccaaacgagacacaggcagcgcagacaggacataacgagagatcagacggctccgctccgcgtccgtatcaccctcgcgccgccaaaggcgccgagatcgccgagcccaggggacgggcagccgatcaagtgcttcgacagcggcacctcaagcgtcgctgcaaccgcccggacgatctcgggcgcaaagctgccagcgacaaacttgaggtcgatcgtcaaggccgggaaggcctcgtcgagcaaccgggcgttggcctgaagctcggacgggatcgactcgaccgtctcgtacgcgtggatgaggacgaggcgcgaggtctgctcgttcgagagcgtgtagaggacgacttggacgaggttcgagatctgcgcgagggaaagaagggggaggaaggttggtgtgagaaagagaaagagagaccgctaggaagcgtctcgaccggggcaccgccgcacctcgtcgtccttgacccaggcgcagacgaccttggccttgctccgcctgacggctcggacgagccacttgcggacggccagccggattttcccccggcccttgacctcctcgtgctcctcctcgcccgccaaactcgccggcttgccgcccctcgccgagcgggcgaagcgccagccctcgcttcggtcgagcatccacacgagcccgcggagcatcgctgccgtcttctgttctgcaagccagagcaggccaaagatgcccaacgcgtaggcgagcgtgagcgcaagagggagcggggagaggatcgtgttgccgatcaggagggcgccgacgagcgcgagtgcaaggagaatctgcgggaggccgacgtgcgtcgctggcggaaggagcggaaggtgcgggaggttaatgtgcaggagaagagccgagatggcgtaaaggagcatcatgctcgtgaacgaaagcgaaaatatgttggagagggtcgtgagcgagaagccggacgaggcgtagaagactggcaggagaaggggaagcggccccgtgtcagtacacgggaagttgcccagacctggagggacgactgaccgacgcagagagcgaggtagacgccgataccaccgacggaggtatttctcgtccagcgagacttccaggcgacccagcgtggtaggatgccatcgccgctgagtcggtcaacgagcgagcagcaagagacgccgccgcaaagcacgccgccgcagaggacggtgacggcgtcgacaacggtcagaatctcgaggaagcgcggcgcgtagcgcgatgtcccggcgaggtgcgagagaaggttggtttcggtgtagaggatcgagggcgggagcgagagggagaggaggaggaggagcgggacgttgaggagcactgcgccgagcataaggttccggatcgcctttgagtaggcctcgggcttaacctcctcgacgaagctggaaggcaagaagcgcataaacgtccgaagcctcactcgagcggccggcgggcgactcacgttggcatgcactcgatgcccgtcacgccgagaaacccgacgcagagcccgttccaaatcgcccgtgtcgccccggccgggccgatccagctcgccatgtcgaacgtccagttgagcttcaggacggccgggccggtcgagatgagcgtcgccgaggcgaggacgatgaggagtgccattgtgccgagctatcgcagatctcgaggtcagcactggattggatggctgcacatcgcaggagggcggcgcacgtggaagaggcagatggagagcgtcaagcgagtcgagtccttgacgccaaagagcaagagccccgcaaagactgtcgccgagcagcagggtggtcagtggccgagcgagcagcaaagcgaaatagaggacagaccgataaggatgatgaggccgaggacgaggtccttgaacggcatgttgtcccactcgccctcgatgtacgccgcggccgtgcctgcgctgacggtgccggtcgcgacgctaagcggaacggcagagtgatcaattgaggaaggccgatcgcacggctagagggggggggggggggggccaacgttcgggggggttcttggctcacccaaaagggcgggggggggggggggggggggggacgcacacgtcgaggagtgtcatggctgcaccaaagaggccgagtgacttgccgccgacgttgagcagataggcgtactggcccaaaggagcgacaaaccgtcagcgacctcgagaagagcgcacgcgtggccaggcggctgcagacggacgtttccaccattcagccgcatggcccctccaagttcgacgaggattccccgccaaagcgcgaggatcgcgcatgcgattagcatgctgagtgccgagagcgagcggccttggctaacgatggctgggagcgagtagaagacggagccgaagacggcgttgcctgcgacggaggttgcgcggaactggccgagtaggccggtcgccgtcggcggcctgtctgcggcgatggtagtgggagagggcgagagctgaggcggaggagggggagggagggggatgtacgagactgagccccagccggcaaactcccagtcgtcgtcgccctcgccgtgcagcgcggcgatacgctcacgcttggcgctccgcttgagcgagcccggttgcgtgtgcgtcttgagccgccggacgatctacgggagcacgttgagcaggtcaggttacagtgcgcttggcttgacacggagcgaagcaagttgaagccggacgtaccgtctcaaactcggaccgctcgaacgacggtggtggctgcggtcccgacccgcggccgccggggggagtcacctcgcctgggcttgtcgactccgaccggccgagcatcatcgaccgcagccgctcgagctcctgccgctcgggcccggcgagttggtgcgagcgcaagcgcgaggcgcgctggggtgtgccgctgccgccgccgctgccggagtacgcctcgcgctccttggccttcttacccttggccgacgccgcggtcggcgtcagctcgtagctttcgataccagcgcctgccgaccggctcgcctcctcgtagctgggttcggctccgtcctcgctctcgctgtcggatccaaagtccagctcgtgcgagaccgagaggccagagagctcgagagccgaaggcgccggcgacgacggcggggcggcgaccgtcgccggtcgacgcccgggcgtccggagcgacgctgctccgcgtgggacgagcctgagcggcgagccagtccctgcgggcgtcgtcggtggggtcgcagaggtcgttgctgagctggcagctgggtgggtagcatgccgagagcggacgggcgtcgaggggggcggcggcatgttgtccgacggaaggggtgcgcgtcaccggcagcagcgagggtgaccgtccgtccagggtcttggctcgtgaagcagtcaggtctgtatgcgtgctgtcgcttctgcttctgcttgtctgcgctctggccgtgctggtcgtcgctcactcgctctgccgtctgacagccccacgaatgagccgaggcaggccggacgcgcgcagcaagcaggcaagctcgagccgaccgtctccgttttcaaaccgccgaccacgacctcctcctctacttaacatagacagcctacagatggcccctcctcctcagaacaattgcgtccagccctcggccctgccgtttccgatcctcaacaagctcaggggcaagcggtcggtctaccctccttcccagcgaggtctgtcggacgctccgtcgtccgctcttgctgacgctgcgtgcctgctcgcccctccagggtcgtcctcgcctccgcctcgccccggcgcaaagagatcctcgagtcgatcgtcagtcccgcgcgatcacgcgtccgttctcgtccttgtcagtgctgacctcttctcgggcctccgacaccagggcctgacgcccgagatcgtcccgtcgacgtttgctgaggacctgccgcacgcgagctacgcgcacgacttggctgagtatcctgttgcgacggctggcgagaaagtgggtcagactctaccgcgcggggcgtgttcggcaagcgacccaacccggctgacggctggcacccaccttcgcgcaggcccgcgaggtgtacgagcggcttgtggccgagtcgcccgacgacgcgcccgacctcgtcatctctggtgcgtcccgcggtcctcccaccaacgctcaaccgccctgcttaacatctgaacgtccccgctctcggcagccgacaccgtcgtcatcttcccgccgctcgtgcgtgaggacgagcgcgaagagctggcgctcgaccgggcgaggcgcggcgagagcgtcatcctcgagaagccggcgtcgaaggccgataacgtgcgttttggggcttgcgttgcacgacggttggtcgtgcgcggagctgacgcggggtacttgggcttgcagctgcgcatgctgctcgacatgaatggcgaggcgtgccaggtgacgacggcgatcgtcattggtccgtcgccccgctggctccttcttcgtctccgccactgacctgtcccttccctcgggcagcctacccaacgctctcctccccaggctacgccctccgctcgctcgtctcctccaccctcctccacttcgccgactccccgcccgcggtgctcaaagcgtacgcagcgaccggcgaggggctcgacaaggctggcgggtttgcgcttcaggggagggggatgccgcttgtcaggtcgatcgagggcgagtgggggaacgttgtggggttcggcgcgagcgcgtttttggcgtgagtcccttcccgattcttctgcttttgtggacaggacgctgattttccttctccacaggtggatgggcggcctgctcgacgacgaggccgaggacctgctcgagctctgaggactgcttgctgtacaggtccgtccaacctcctcgtttgcgttgccgctcgccctctgacagcaccttgcctagatctgcccccaaagcgaatcctcgccgtcgttcaggcgatggccaacgttcgccgtctctcctagacctcctctcccagctttcagagccggcgacggaggtcggggtagctacatctcatgcgtatcacccctcccctcgcgcgaaggcgagtaggcctcgatgactcgcgcgcgaagggcagcggcggagacctcacgcagaaggggagctgggctggcttcgaccgcagaccgaccgatcgatgctgtcctgctggcgagcggatcaagcgcgagaccagggctggtcagcgacccgtgcaagatgggtttggtagacatctactcgaccttgcgtcactttccgcccccggccttctcgccggcggctccgtctcgtccatgaggcgggtggcctcggccataaggcggcggaatctcctccttgtcactttgctcgagcgctgcctctgccttatcgccgagctcgactgcggcctcgtcggccgtccgcttctccaggagcgccgtattaaaactgccctcgccccgatgggagttggccgaaggggccatggacggcgtcggcatgtcgatctgaggggtggcgggcgtggggttgttatccgagagatgggcgagctctcctgactggcttcgaagcgctcgagggtaggcagcagtcaagatcgatcgcatgctttcatcaagccggcctcctggctgctcaagtacgacatgcgttcgcggcgtggagctcgaaagtgtgaggacgaggcgagggcggcaagagagtctgaaccggggcgcgcgaacgagaaggggaatgaagagcgaggtgacaggcggagaagaggaccgcagggaggcttcctagctatatagcggaagagacagtgagggcgactcttaacgacgcgtcactcagaggcgactgcaggagaacaagagcgaggaaggagaaaggggtcgagggagccccgcggcgcagagggccgggacgagcgagagcgggacacaaccgcccatcagaccgtccctgccaccctttcggcttgccaaactcgaggaggggccgcgagatgatgtaccccttgcttgtatctgcccttttcttcgacgccgcgggcgttaagaggcgctccaccatccggcatgctggatgctaggatgtgcgagcccgtcgtcgccgcgcccagcatgcgacgttggccggcgtcggccgtagctcctgccataaatcttccaactctctgctagcctgctggcttaagttgccgatttgacctctgccgcctattattgacagcgacgcacgggcgctcatccagatgggatcgcgcgggcaagggctgggcaagcagatgctgctaaggcagagcaggtgggccgccggcaatggcagagaaagacgatcgacgttttcccttccgacggccaaccacggcacgggacctcctcgtccatcaactcggtctcgcaagccacaaaagctgacctgggtccctgcttggtgccatggctgagcccgccggctgagagggagatgacggcgtctgcaagcgagcggggaggagggatgcctccctcaaaacctcaaaagggggcgacggagctgaccgtccttcctcctcagccctcgctttctccatctccctcctcaagatgctgctaccatctcagctagcgctgcctctagtagcgatcctcgcgcccctcgcctcggccctgccgtcccgttcgccttcggctgcccagcaactcgtccagcgagctccctcgcctgagccggccggcggcccctcggccctcctgcgcgaccagctcgactggtcccggcgccaggagtcggccccggccggtggctactcgctcgacacgtcctcgtgcggaggtcagtacggctcggaactgcgtcgctatgaccagaggagatgctgacgcacgattcatctcatcgcaggctacaacctgacctcggtctcgcagacggcgtccggcctcaaggccgagctgtcgatgatcggcgaggcctgcaacgcctttggcatcgactacgagcgactcgtcctcgaggttgactaccagagcaaggatcggctccgggtccacatctacgacgccgacaaggccgagtacatcagtgcgtccttggtttggacgggtggtgctgctgcgctcgcgtccgtcgtccacttgctgaccgacttaatccatctgcccactgcgcagttcccgaggagctctttgagacgcccggggtcgacgacggcttcgacatgacaacctctgacctggtcttcaaccacgacccttcgccctttgccttctggatcacgcgcgccaactcggacgcggcgcccatcttcgacacccgcccggcgtctaagcaggccgtgcccgaccccatccgctcgcccggctacggcggcgtcatcaaggacaactcatcgacggccgtgctgaacgaggccggtgccctcatctttgaggccggctacctcgagatcagctccgccctccccgtcggcgccaacattgtcggcctctccgaggtcgtctcgtcaagcggcctctggcgaaactcgagtgcgacggtccaggcgctctgggcccgcgatgcgggcaacccgaccgaccaggtaagcccatccacagtttctgcgcgatgatgtcgagcttggtctgaccgagctttgttgctcaaccttggctagaacgagtacggctccttccccatgtacttggaatcgcgcgtcgacggcaactcgacctcgtcgcacggcgtcttcgtgtcgtcctctcagggccaagacatcgtactccgcgacggcgtcatcgagtaccgcatgctcggcggctcgatcgacttctactttgttgctggcccaaccccgctcgccgttcacgagcagatggcgtatgtcatcggccggccggccatgccgccctactggtcgctcggtttccatctctcacgctggggctacgacaacattacgcaggtgcgccacaacctttatttcgaccaaccagtctcgctcggcctgactcttgacgctcctctcgctagtgtcgcgagatggtcgacaacatgcgcagcgcgaatattcctctcgaggtcgcctggaacgacatcgactacatggtgagctcgcccggtgggctttttggcggctgataatgtcgactaacctgctgcctcgaccgcggccaggactcgtaccgcaactggattccggtcggtttgttttccttcggtcctcgtcgacttgctcaactctggctgacccgccctctctttcccttgtcgtcaccaggctccgaaccgctatgaccctgacgaattcaaggcctacgtcgacgagctgcacgccaaccaccagtactacatccccatcgtcgacgcggctgttgccgtccttaaccctaatggaagtgacgtctacgagtcagtatcctctggcccattttgtgcccttcttggtgcacgggggccgatgactgacctgctcgatcccttcccagtccctacacccgcggcgccgagctcgacgtcttcatgaagaacccggacggctccgagtaccgtggccaggtgcgaccgaccgcccgagcatgcgcatgcgctcgccctgagcccttgctgactttgtccttcctccgttgccaacaaggtctggcccggtgtaaccgtcttcccggacttcttctccgagaacacggaagactggtggatcgaggccaacctcaacttcacaaagctcgtcgacctggatggaatctggtacggaccgccttactttctacgcgcgcctcgagccgtccctgacctcgctctctcactccgtcgccgacaggctggacatgaacgagcccagctccttctgcgatgggtcgtgcggctcgggtcggaccgatctcgaaaacatcacgacgcccttcctcctgcccggcctgcccggcaacgtcgtcatctttgacgctccttatccggaaggttacaatgcgactctttggggcacctcgggcaacgtcaccatcaacggtaccctcacctttaactcgacgccgcccgcttcggtcgaccgccgcgctcagctctcgcgccgtgtcggcgccggcgtcgacgtcaacacgcccgcatacagcatccacaatgcgcttccccgcctcagttcgtcgaccgtcagccccaacgcaacgcacgccggcggctcgattcagcatttcgatgttcacaagcgagttgcgttggcctttcttgtcgcccgtcgatactgaccgtatcccgcgatctacagtttctacggcaccatgatgggccgggctacgatcaaggcgctcgaggcccacaggtgcgaacgattactagcccctttgcccacgtaagattgcctttgagctgactctccctccttcccgcgctctgcgccaggcctggcaagcgtcccttcgtcgttgcgcgctcgctcgcccccggcgccggccgaacgcttgcccactggacgggcgacaacttttccaagtggtcgagcatgaaggacagcgtccgcaacgttctccagttctcgctctttggcgtgccaatgactggcgtaagctatccacctctttcacacctcgcctagtttttcgctgacctgtgcgtcttttcgctaacatgaaacttaggctgatgtctgcggatttctttcgtccccccttcccttcttcttccgagttaccttgctaatcagagtctctcccccttcggcgttcatctacacagagggcaacacgaacgaggagctctgctcgcgttggatgcagctcggcgcctttcaccccttcgtatgtcctgcccgccgcgacaaccgtctgcagacgcactaacgtcctgaccgatcgctaccctcgacagtaccgcggccacaccatccgatcggctcggcctcaggagccttaccaggtgcgcttctctcgtcgacgagctcattcgtgagcgagaagggctgacttgactgcctctcgctcgctcagtgggactctgtcgctgaggcctcgcgtgtggccatcggcgtccgctacgccctcctgccgtactggaacaagctcctctggtacgcccacacggccggcacgcctcttatccgcgcgcccttctacgagttcccggccgacgcctcgctcatcggcgtcgacgagcaattcttgatcggcccggacatcctcgtcacgcctgtcctcgagccgaatgtgaccgaggtcgagggcgtcctccccggcggcgacgccgtcatctggcgcgactggtatgaccactcggtacgtcgctggttataatctaatcattcgctggcttgcttgcgatccgacgctgacactcgtccgcctctcgggcaaccgcggtgcaggtccttaccccgaccgacggcaagttcaccttcccggccccgctcggccacatccccgtcgccctcaagtcgtcgtcgatgctcctcctccacgccgagccctcctacacgatccacgagacccgccagaaacccttctcgctgctcgtctctctcgctgcggacggcaccgccggcgggacggcctacgttgacgacggcgagagcgtcggctcggccttcaagctgctcggcctctctgcgagcgacaacaggatctcagcgacgaccgagggcgactacaacgtcgagcagccgctcgccatggtcaccgtccttggcgtcggccagaagcccgagcgcgtcacgtttagcggcgtcgcgacgaccgactttacgtacgaccaggcgacgcagaagctcgtcgtcaagggcctcgtcggcgacctcaactcggcctgggagctcctttactaggcagcgttttcatctcctcttcttcctctccgcggactcctcgccgcactgtagcctacgcccgcgctccgcctcaacggcggctcgcattcccgaaccgaacactgcccgccacctgcccacagcggctgagatgaccattattccttgcttcactttgcgtccacacagcgacggcccacgacagcacggacaggactgaccctcttgacactcttgctgctctcgggatcgttggtagtcgtcgacaggcagcgaaggggggcgacgacaggtcgaagcgggcggccgcgcgcgcgggcgccgcagcccagcactcccctccctaagctagccgatcaccctctgatcggatgactgccaattcacttgatctggggtcgcatcgtcgaggacttcccagcggtaccgatctcgctgctgtcggagcctcgggcccgccgccgcaggcgtcacccatcctcccccggtcgattccacccgaaccgcctgattgacccctcggttaggcggcagatttggaaccggcgccgtcgtctgcttccagtgggcaaggcctgagctcgatccaacaagatctcgctcaacttgtgagatccaggtctgggaccccttgacctggatattcagatcctttagagggcgtcatgtgaaaggaagcaaagcgagagagcggggtcgtgacaggggacgggcaagtgcatgagtgggagggatagtgcgatggggaaagggcggccccgacgaggggcggcaggagagaaggggggtacagaaagcgtcgtgagggcagagttattgcgatagtggctgtgtgggatgagagtgagaggagtcgaatgcaggaggggtcaccagatgtcgcgcgagccaaggaggtactcgctcgcctcagcgccggcggtccaaccgccgccaaagacgtcgccgccgcgcttatcgaccccagcggcggcgctggcagcggccgcagccgacggtgagcggaagccggcgttccgagcgagctcggtgtggagatcccagcggtggtcgactggctcgccatgctcgctcgagccgctgctgtcgctgctgaaaccggagcttgcgaggctgacgagcgacggcggatccgagtcggtcaggaacgtgtcggtcgacgagcaggccgaggacgacggagatgcgagcaggtggagcgagctgggggtcgcggccggcatcaggtcggcggcggcggcggacgttgcggcagttggtgttgtagaggcctccgagaagttcgccgccgctgccaacgttggcgtcaccgccgtgtcgatcgccgccggcggtgagggagcgagggccgatcgaaggagcgaggcggtcgggccagagggcgtcgccggcgggctcttttttgcgaaggcgagcgtggagatcgagctgccaaggtaaacggtcgaggacgagccgttgcggtcggtcgagaagctcgtcgttgtcggcggcggtgatgccgccgtcgaggacgaggccgaggatgaggtcgaggaagatgcgggcagcgagcagacgcgcgtaaaggggaagccagcgccagaggaccgagcgagtgccggcctgctgccaatactgcttcggctactgtcgccgccgacgaggaagctcgacgtgccgtcgtcccagcccggcgtcggcggcggcgagtcgctgacgacccggccgccgtcaaagagccagcgccgcatgcctcggctctcgtcctggtgctcctcctcgtcctcaagccggtgaggggcgacggcaggcgcctcgtcgtcgtcgtcgtctgagtcctcggcagtgtatgccgtgggaagcgggccggatcggagttgcgcacaccacatcattcgccgcgtcgcagggctggcggcgccgagggagtttggcgagcccgtctcatcgttgtcatcgtcggcgtcaacgcgtgacggtatcctgcgggggatcgagagtccgacaagggagctcgtcggcgtcgccgaagctgggccgtcgaccgagctgctcccgctgccgctagccgctgcggccggtccagcagggatggcgatcggccgggtcaaagaggtcgaggaccggcgccgcgagccgctcgggacgccaaagtacgagtagctgctcgcggcgacgacggccggcggcgtgggcgagttgccgtcggcggcagccgtgccggctgatgagccgccgagcgccatcgggggcgacatcggtgaggggttgggcgtgcagggctcacgagggctgccgcaggcgttggggtctgagcatgaggttggacgtcagccaagagcgggggtagccaacaaccaacagcacggggtcgcaccttccgaggcaaactccgccgtctcgacccgccagagaccaaagcgcgtccggcagcgctcacggatgcgaacgagctcatcgtcgagctccttctggccagccgagctgagcaaccggtcctccgcgtcgaccttggcctcgtcgcctgcggcaccatcgtctccttcgggcgagatatcgccgccgctcgggctccgccgaccaggactgaggtcggcctcgtccatggctgccgcgagaccagcagcgacggcgagccccatcgagcgcatcattgcgatccgccggtccatcatctcgtcctcctcggccgagaccgcgctcgcatccgccggcagcgcgccctcgttcgacgactcggtttcggacgcagagtcgtcgtgatcgcttgcatcccttgcagccagctcgtcgacgacgagcccaccgtcggccgcgacgtcagcgtcgggcgagtagaagtagcagcgcttggaccctcgctcaggcagaacgcatgaccggccctcctcggagatgaggatcggcgtccggtcgtattcggctggcgagtaggtctcgtggagtgactgagagagagcgaggaaggatacggtgagcccttgttgcacagctcggtgtaagggcgtgcggaaggcaagacgtactacaaagcgctctgcttctgcgaacgggcatggaaaacggacacgcttcaggtcgcaagccgggtacggcagctcgctcgtcgcgcttccggtctcgtcgacatcgacatcctcgtcgccagcggaatcgtcttccgtctggccggccgggggcgagctgctcgacgcgagttcgatcgcgagcgacgtcgtcgatgcagccgtcagctggaggtgaaaaacaggcgtcgttgacgtcggcgaagacggcgaggagaaggaagcagatgtcggcggcggcgacggtgaaggcaagggcgcggcggggattgcggtgcttgaggttgataaaggcgacgacgcgatgggagcagcagcaggcgtaggagcctgtccgagcggctgagcggcgagcgtgatggacatggccagcggaggaggagcgagaggacgagggtggcaggagttgaaggaaggcgtgggagggaaggggctaaatgcggtccagtgcttgctgacgcgtgttggcgggcagagacgcgcgcgtgcggacgtttcgagagaggcgcgctagcaagcgaggtgcgagtcgccaaggggaggcgctggccgagtcgaccggttgttactgagttgactggagggccatccgagcgacgcttgttccgaagggtggagagaggagaggcggaccaaagcgggagaggggtagctgcgaggagggaaggagccgcacgaggccgagctgcttgcaaagcgacgggtcgggcgagagagggctttgacctggagctgtgcgagagcgcggaagagcctgccactcgaagtgccttgcgcccttgatctcctgaggttaggcgaaagaagacagtgggagacaggttagcgacctgactcttgctccggcccgtggtagtgcgtgtctcgcctcgctcggccgcaccgccttcgaggccgactgagggcaaaatggaagcgcacctggttgagcccgccagagagcggtcgtcgatcctaggcagatcaagcgaaaaggctggtccaactggatgccaggcaagggaggagtgcgtgttctgaaggaggggcgtcctaggagggaaggagcagcctgttttcttgccctcctgctggctcgcaactgacccgtgaggccgaaacccaggagtgacccaagctgggcttctggcctgacactttcagagtccgccccgaagagttccgccccgcgcagcatgcagagccttctccgatgcgccgccagctgtcttcgtcaccgtcgatcagcggccaagcgcacagcttgcaccagaaaccgtagaagcacagacatgacagaacatcgcgcaggcagaggtgtacaacggggtgtggaggggatgcgacgaagagtgcgaagggaccgagagtgcgggggttgcaaggggaggcagcgtgtggaggagttgcgtgggtgacgagagagcagatgcaaggtgaatgagaagaaaagcgtgatggaatgagtgaggatgcaaaggaagaataaggaggaggagggggtttgcaaggggctacggcggccgctagcgcaggttgccgaggaaggcgtccatgccgagcccttcatactcgtcggcggccggcaggtcctcaagcccgtcgagtaggctcatttgcgagacgggtccgttgctgcgctcggccgcctgctcagcttgctgcttgcgctgggcggcctgctcctcgccggtcgagattttgaacaaatcgagcacgtccgacgtgttcattgactcgagcccggcattctgctgggtgacgaccgcgttggcgacgttgagcttgaagcgctggaggcccatgatcttttcctcgagtgtgccgcgcgtgatgagccgatagacgttgacgaccttcttttggccgagccggtgcgcccggtccatcgcctgaagatccttcatcggattccagtcgtgctcgacaaagacgaccgtgtcggcgctcgtcagattgaggccgagcccgccgacctgggtcgtcaggagcaagacgtcgatcgaggggtcggcgttgaacgtctggacgacgccgtgccgcttcgagggctcagtcgagccgtccatccgcatatacgagagcgctggcatctgggccttgaaaaggtcgctctcgatgacgtcgagcatcgtcttgagctggcagaagatgaggactcggtgctggggcatcgcagagaggtcgtcgctctcgctttcagcgatcgtcgtcgccgtcgagccgccgccgccgccgccgccgatgccgcagtcggtgaggatttgtctacgaggccggaacggcgattgcagcgggtcagcgcggcgcatgacgactcagtcgacgctcgagggacgaacctcagggcctgcagcttcggagcgttctcgatgtcgcggaggcccttggcgccagcgctaccgccggcggcctggaccttggccgcgatccgcggatagtcggcctcctgggcgacgagacacgggtgattgcaaagcttgcggaggtattggagcgactggaagacgtgggtctggcccttaccaccgccgccggtcgagacgacgtcgccgacgtcggcgcttgcctgcgagtgcgcaaagtcgtcgtagagctgcttctggacgtccgacaggttgcagtagtagtcctggatgatcttgggcggcaggtcgtgcaagacatcctccttgagccgccggaggagaaacggcaggacctgcttgtggagcgcctcgagcgcgagggcggctgcaggcggggaaaagagggtgtcagcttgggctcgacacagagctgaacaagtgaggggacgcaccggcctcccgctccttgggcgtcgccttgccgtcgcggtcggccgtaatgggcttgccataccgctcgttgaagaagcgctcggtgccgaggaagcccggcatgaggaagtcaaagagcgaccagagctcgaggacgttattctggatcggcgtgcccgacaggatcagccgatggttggcccggagggccttgacggcctgcgtcagcttggtcttgccattcttgatgatgtggccctcgtcgaggatgcagtagtgccagttgaggtcgcggaggacggcaatgtcgttccggacaacctcatatgacatgacgacgacgtcatggctcgcgagcttgggtataaggagcgcccgctcggccgcgttgccgacaaacatgagcggtcggagcgattcggtaaacttgaggacctcgtagaaccagtggccggtcagcgtcgacgggcaaacgatgaccgatggcaggtgaaccgcgtccggcgcgcccgttgtacggaagcgctcggcccgctcgtgatgcttgccggcgaggatgcagagcgactggagactcttgccaaggcccatgtctgtttatgaaggcagtcaaggtcagcggccggcaccagaggactaacccaggagaggacggaccgtcgcagaggatgccgtggagctggtacttggcgaggaacgcaagccagttgacgccctcctgctgatagtgccggagctcggctttgatcggaaccgggatcgtgtacgtttcaaccttgctcccgtcgagcagttgattgagaaactcgcgctcgccggcccgctttgcgagcagttcgtccgagaagcctggagggtcggggatgccagcctcgagcgggaccatcttgacgagggcggcaaaggtgctcgtcgccgagagccggacgttgtcgtccggatcgctcatccggccgagaatcggaacgaccatgaagaggacgtagggaagtgcctggctgtcgagcgttcggacgaggtctgcggaaggacgtggaggcgcaagatgtcaacattggctcttggaaggtcgagtggaaagggggcccttacgagagacaagctcgaccgcgccctggcgcttgacgactgacgggtcgccgatgaagggcagggcgtgctcgacgacggcacgcatgccctcaacggtgacgacggcacagacggcggcgacacagcgggccgagctctgccggatgacagcgtattcgctctggagcccgcgcagaacggccggcagaagctcgagcagcgccggatggaggccggcgtcgacgtggccgacgagggtcgcgagcgtcgtcatgttgtcgagcatgtcctgcccgagctggtccgagccggcaatggctgcatcggccgcagtcggtccggcggcgagcgtcgagctgacggctgatgacaggcagtcccagagcttgggcacctcctggaacagccggggcccaaagagctcggcgagccgggcgagcgcggcatgggcgccccgacgggtgatgcgcgagaggatgacctcttccgagtcgacgacggcgacctcttttgcgcgacccttaccgctgctgccagtcgtcgtcgtcgagccgactgcggcgcggagcgagaggatgccctcgcggtccgtctttgccgcggcaaagacggccgtgtgcgcaatttcctggcagacgaaggtcgcaaggttcttgacaatcttgtcggatggattggcccgggccgtcgacgagggcgatgagcaaaagacgacgagcgaagcaacgccgtgggcgaaacggcgctgcatgtcgacgttctcttcgaactgggggggtcgcagagggggaaaggtgtcaacagctagacccttcgtgggaacgacagggccgaggaccgaccttgatgccgttcatgatgctccggatgacagggttcagcttgaccggaagcgtccgcaggctgatgacggccgtcgcgacggcagcctggacctgcctatcgtggcgctccttcatcgacagatagaagccgatcgagccgacgacgcgcatctgcttctcgcgcaggcccggcagggcacccttgagcgtctttcggccgacgttggcaacgagcgcgtcaaagactggaccggcgacgtgcgaggccgtttcgatcccaaagacgtcgacgggcggctcggtcgggacgagcgacggcggcaggacggggatgagctcctgggcgatgccggcgtcggtgacgaaggcggcgagcagcgtctggcactcggtgtagatttggccgagaaagaggagcatctcgtagtagctcgaagggatccggccctcgaggatcgcaatgagctggccgacgagaacgcgggcgtcctcgtcgacctcgggcagcggcggggggagcgttttgccagcggcggcggcttgggcatcgaccgctttggcccattcgacgacgacgacggcgagaaagatgagctggtgcgagctcgtcgagccgaggtactcgagcgcgagccggtggaatgtcggctcgatagaacctcccgctctctttggcccgcggacaacgagcgcggcgaacgcctcggcggcggcgaggcggccattgaggatgtcgtcgacggcgatcagcgagaggtcctgggcgagcatattcttgtcgacgttgtgcgagacgtggtgcgcgctgtcgagcgcacggccggtccgaccgaccttgacctcggaggctggctcggcccgaagaaagagtgccggatcgagcgggacgcctgggggcgacatggtgagctggagccagggtgcgagtgagtcggcgagctcgcgctcgacagcggctgaggaggaggaggaggaggagtaggatgcccggccgagccggtcgacggcagcatgccaagtggcaagcgtcgcctcgcggacgtctgcccgctcctcgacgatgaggttttgaaacagaaagcgaaacaaccggccgtcgagccaatcgtcgtcgcctctgccctcggccactgtcgctgtagcggtcgagaggaagacgagaagcgcttgcggcacggcgagccgaaccgaagcgatagtatgccggaagaacgagtagagcctcgggacgagcgtcgcgagcgcgagcgggccgccggcggccatctgcgtaaggcactcggggaaagcgataagcttacctacaaaggtcgatgcgaggtagtcagcgacaagaccgctggaagggagactggagggacggaccgagcagcgtcataatgactccggtgctgctgccgagctcatcgccgccttcggcgagcgcttgccagagaacagaaagcacgcggacgagctcgtctgggagacggccgctgacgagccggtcggcgacggggaggaggcacgcggccgagacggatcgaacgtcgtcgtccgtgtcggccaggctgaagggtaaagcaaggagtcagatgggaattggagggggccgtctagggaaagaggcgtgaaagagggagaggcaggggctcacccgaggacggcagcgtcgacgacatcgcgcaagaggtcgatcgattgctcactctcttcagccgtgacaggcgcctcgtcggtctcgtgcttaacaacgacggcggcggcggcagtcgatgcgaccggctgcggtagcttctcgtcaaactgctcctcgcgcttgacatcgacggcgatagagccggctgcaggtgcttcggccttgacgggagacactgttgcgccgttgaccgccgtctccgtcttgacgacgtcggcatcaaaaaggtcggcccggacggcaacctcgtacttgagcccaagcaggccggcatgtcggacctcccacgcatagcccctcgccctccctcccgccgccgacatggctgaggccgagccggcctggagccagtcctgtcggaccatcccgaccagtacggcatgcacctcggtcacgtgcctcgccggcagatggacgagcacgctcgcgagcgcctggccagccgtctcgcgtacgggcgcgacgagctgatctgcgttgaagtcgccaaagcggtcgagcgccagtagcgtcagaacggcatgcgcgaggccgagcagccgctcggcgttcgcttgatcatttacttgcggagcgtcgccaacggttcggccggcagaggccccgtggagcttgatgagctcccggaggccaagggccgcaccgtgtcggacctcccaggcgggcgcaaatagaccgacaagcagctgatcgatgactctctcaaacggccaacgctcggcgcccgaggccgagcgcgggacgacgatattggccgtccagtcgggcttgccggtcattgggtcgacggctccgcccgctgcggcagccgctgcggcggcggcggcggctttcgcctgaggatcgacaatgacggctgccgaaagagttgaagagcccgctcggggtgagccaaccggcgacggcgccggcgaaggtgcagccgagagcggcgagtcgagtctcggcgctttgcccgaaccggcgccgctgctggtggtcgcagacgaaggaacgacggccgccccgccagaggctttccgcttgcgcttgagcgcattgatctgccttgccgaaagcccgcggaacgcctcgtcctcggcttcgcgctgccggcgctcctcctcgcgctcaaactgctcgcgctggcgcttgccgcgtggaggagcgacggcggtgggcggcggagcgggcgcggaggcgggtgccgttgttggaggtagggtcggcgaggcgccgtccaaaggggtcgtcaagccgccaccgccgccggccgtcgggctcgtcgtcgtcgacgggccggcaccagcgtcctccgcagccatctcgtcgtcgacaaacgcgccgagcccatcgtcaagcccgcccggcagtgcgatccccatccgacgcatgacctcgtcctttgactgcttgagctcggccgcgctcagcgggcccgagccggcatgctgggcgccgcccggtgcgagggcgtactctttgccggacgaggcgagcagcttaggccggtcgggtgcgagcagagcgcgaaggtcaacctggcctagtgcggcgagcttcatcgggtcgacttcggcggaagcagcggcggccgtcggacctccaggaggtgcagcaggcggcgaccagagcgggacagcgcgcgcaatctgctcgagcgcgagcgccgcggccgagcgcgtgtcgtaagactttgagcggaggtgcgggagcacgcggccaatgaggccgaggacctcggtccattcggcgtcgctctcgagtccgaggccgagcggagcgtccgagagcgaggcggaagcggatgcggcagaggcggcggagccgaacgagcggccggcgacctggccgagctggcgggcggccgtctgcttgacggccggcgtcgagcccgtctcgaggagcgagatgagccggtcgaggctggcgccgaggggtggttcaggtgtcagcacttgtcgtccggaggtcggcttgctggagctgagagggacggaccgcgtgctcatggccggctgctgctgctgcaaaacagggaggaagggaggaggaggaaagggtgtccgctgcgggcgcgcgcgggaggaggggcaaagggaaaggggagacgccgcgcgacgagggcccttaagggaaatggccgcgctgtgatcctttaataattttctcagtgcgcagagagcaagaggccgattttcgctcgctcgctcgctcgctctcccgaccgccatcacccgcccagtcccagcctcgcccgtacgtccctccttctgcctcctttgccttcgacccgcagccagcgtccactctcccaatgatgaccatcagcactgggcactgaacctacgtgagccgataacgcctaacccgcatccttcttggacggggcggacttagaaaacccgtgactgagggagaaccgacaacgacgttggctgctgctgctgctgcttctggaggagcgattcgaacagaaggagagcatcggagcctgacacccctttttccctcctctcgaataggccaactctttttcgacgacgacgatggccagcgtcgccgccgtcctccccgacacgctaagcgcgatcgctgcctccctcgcccaagccaacagcgccctctcgccccttctcaccaacctccgtgcggaaggcagcggctcgcttggcccagcggcggggacagagggcctgtcgttacttgcgctccggccgaacgtcctgctggcgtacacgcacgtctacgcgctcctactcgctggcgcactcgacccttcttcgagcgagacgacgaccgccgccgccactccgtcgtcttcatctcggtcgtcggtcctcgacgatttcactgcctcacggccaatccctcgtccgacgccggcgagcagcgagcgcgcgctcatcgaagaggccgtgcttgtgcgcgaggtgatggagcgtgtcaaggggatggagggcaaagttcagaagcaggtcgaccggctcgtcaagggcgcagtcgatggcggcggcgatgcgaaggacattgcgaacggtcagtctcgtcttcctccttcgctccccgcctgaatgggcgtggctaattttactcgggttttcatgctcgcacatgacagaccccatgtcgttccgcccgaatccgtcggcgctcgtcaagccctccggtcagccagacgatgattttgaccagcccgaggcctcaacgtccggttccgctggcggtgcgctctaccgccccccacggctcgccgctgtcccctattcggacctccccaagtccggcaccaggaagggcaagcaagcagcggccgagcagcgcgagtcgagcaagacgtcctcgctcctcaaggactatgcgcttgggaccatctcggccctcccgcaccaagagtcgacgtctggcctcccctcgctcgcctcgtccgcgcgctcaaagggcaagaaatcgctcgcgcaggaacaagacgcctacgaggaatcgtcatttgtccggctgccgctgaagaaatcggagctgaagcgccgcgagcgcgaggagcgagacgatgcgtttgggattggaggcgggtcgatcacgggctgggacgacgtgttgggtggactgtcgggcgttgggggctatggagcgggctcggctccagcgggaagtggcgagcgggcaggtgcgtgggagaggcggaagcgcggtgctggagaggaggggaggaagccggcgaagaagggccgctttgagcgggacgttgggaagcaggctcggcgcggagggaagaagtagggtgcgttgctggaggaagggtcggacgggccgtatggacacgatgaccttgctctcctactctcaatcacctgctcgttcaactggaatgtgctggcgcgaaacgagtgacgactgaatgcaggcgcagtcgagggcgatcgaccgacgccgacgacgacgtgcagcttcccgcccgcccgccaccacccgacaacgacgacctcgacccctgcatacagccctccctctttccaacccaagacacagacccacagcaaatcatgtccgtgctagctgccgccttcccttcctctgctcgtcctgctgacgcttctccgtcgtcgcccatctgcctcctcgtcaccgcctccctcccgctcttatcacccttcccgcccacccacaggcccgcaaagcagcgctgcaagcaccggacgctcgtcctcgacctcgccagctcaccgtccgctgctgcgcccgacagcggctcgtctgtccagtgcgtcgtagcttctttcctttgcgagctaggggaggacgagaagggggggaggcggtaggcatcgctcgcctgcgcgcgggagagcttccacgctggagccggcgggcgggcgatcgaccggcgatgagtcccgtctcgtcgtcccttccccggtggggcagcggccggtcagactggctgctcctactcgtcgtgcatagcactttcgcctcggccgtagccttgcctgggacctcgagagagaggacacggtcgcacagctcgtcctgatcctgccctcgacgagtcatcctcaacctcccccgggccaaggacctcgccgtctgggacgtcgagcgccagacttggacgatcccgtcgggcgagtacacgttctcggtcggcagtagctcgcgcgacctgcccgtcaaggcgaccatcaccgtctagccggctccctgcgccgaccggtcgcagactcgccgcacgcgtgcctgcagtcccttccccttcccttctcaaaagcgccggccttcatcctccagtcgcttggactgtatccttatccatggtcacctttctctcatctcggcaacccgcagaaagctcagacggaaagcaggcggtgcagcacatctagattccgtcgggcgcctctgccgcaagtggcttgcgcatgagccagaattgggcctcgtaaatgtagcgaaacatgccctcggtgttgcctgtgtagtcgctcgatactgatcgggaacagagggcgcgccagtggtcagcagtcgaagagaagagcggaaggaaagtgaaagggacagaccttcgcgctgctcgattaactcgaagccggttagttgggcagcctcgagcacttcgctcagcgtcagctcgaggcgcgctacatggtcgaatgcaggtcagacgaagagggacgagtgaggaggatttcagctagtgccgcaaacgagactctgctcccgccgagcaggcgatgcttgataagggtagaaggggacgaacggttgccgaaccacaaaagcggaccctcgttgatccaccagccgccagggaccagcgagcggtagatttggtcgaggtaatcgagcacgttgtgggctgtgtcgatgaaaaagagggtctgtcccgagagggtgtgcaaggcacgagtcaggtcaggtgtcgagctccgtccgtcaacaggacaagcagcctgtcattggaggtaaaagagtccggaaaagaggacgtacgacgacgacatcatgcgtcccctcgtccggaaacagggtcaaaaagttgccctggtgcagcgtcaggtccgtcttctcggggacgatgtcggggaagctgacggcgcgaacgagcgagtcaggcgagcggtggtgcgagagcgagtggatgtagggatggaggagctgctcgttggcggtcgtcgtatgggagaggacgagcgtcgaggcgaggcttgcggagaaacccgggggagggtcaagtatcagcacttctacgagtcgaggggtcgaacggcaggcgggcagagcaagttccgatacctactgcatgaaccacgagtagtcgttggcgtcgacgctgaagcctggtgcacgcaaggatgttgtccagcagctctaatcagagtcatgatactttcgcgagaggagcaggagcgccggcaaggagtgacgagcagcgcaccctgagccgagatctcgtacgcgagccgactgaggcctgcaccaggaacgagcaccctccggcctgaccggctatcggaccgattgccgccttcaaaggaagggtagagtcggtcgagcgtctcgaggatcggggtgaagagcgcttggcgctcgcgcagtccttcggtcgaccagtcgcgaacgaagctggagcagcgggcaaaagcagcaggcggtcagcgacgaacgtcaatctctcacgcgaggctttgggcgcactgcttgatcatctcgtgcaccctgccctgatctcctcgtccgcccttcgtccggctccagctccggcccagcggacccgtctcgcgcctcgcgagccccgcgagcgcctccaggaagcccgcgttgacctccccggcctggcggacacgctcctgacgctctggataagcgattgcgcgggcgagcgagcgctgccggccggcgaggtgcttgaaggacgagcgtttggtcgcgagcgagctcgtctgagccgcgcggtagccgacgagcgacgaaagcgcgagatggaggtcctcgggcgtgccggccgttgaagacgaggcgccaccaccggagcggaggagcgggacaagcgagaggagtgaaggcgcgcgcgagaagaacgagtagaggacgggcgtgaggagggcgatgagcacgagggcggcgaagagcgggacgagcggcgtcggctcgggcccgggcgctgctgttgaaggaggaggaggtgggcagtcggcgcaggcggctactgcgacggtcgagctcgccgatgcgggtacgcgtgggatgccgcgacgcatgcgaggaggaggcgggagagcaggggcggacgtcggagggaaggaaggagcaggtggaggagcgaggccgggccggtcgtcgctgctgcgcgacaggtctttcccagtcggggctagtcatctctccgatctgggcttcatcccggcacggcccctttcagtcagcgcgcgggtcccgcctcccccggccggctggcgtggcccatcgtcgccttccctcgtcgacccttgcctcgcctccttcgagcaccgaaccgtcacgccagacgagcacccaccagccacacgctcgacagccgcgtctcgacccggcagactcgtccttgcggcttcgtcgctaacccagcccagcctcgcctcgcctcgccatcgcccgcgcgaaaccccttgtgcggcccctttggtccctccttccgtccctcctccggccttctaccggcccgtcccggcaacattctcacgaggcctgcccttcgactaggacacgagccactaccgctagtccgcccgacctcgaactcgcaggccgccagcgccgtcatcgaccgtcacgcgaaagggtgcgtcttcccctccgcttttctcccccctcctgccggcaggatggcccgtgcctcccatccgcctctccccctctccttcctctttggctcgggcatcgcctctcgtgcacgagctggccgacgcagagcagcctgttctctttgccctgcctcgcggaagctcgtcgtgacctgctcgtgctgacgagccctctggccctctctccttttcgccccctcctccgctctgctcgctccgcgcgcgcgcgccgctgccctccaatcgccggctccagctcgctcctcctctcgccgctgcctctgccctcccaagctcagtctcgaccaacgcgtcgcaagccaagtcgacacttgcctagcactcatctcgctccaacctcgaatcgacctcgcgcgcgcgagcttcccctcacctcggcgtcttccctccgagcctgaaacaagctccggcaggccccctctttcgacgcctcgtccgctcgtctcttctctcagcactcgcccgctgctccagccacctccttcagctagcccacaccctccgtcgctagtcgtcatgcagcagtcgtcagcgcgggagtcggccggctcctcggctgcctcaggccaggcctcgcgtcagccctcgccggctcacgcccagcagcaacagcaagtcttttacccggccgctgccgccggaagccagcatctgcagcatccgtcctcggctgccgatggcggcgcgctcgcgcctcggtccggtgcaggctcgcggccgctgacggtcaaggagagcgagctcgtcaatcatctcggccgactgcagtttgtgcgtcgttcccttcatacctcactgatgtcgtcctcttctggctgaccgtcttggcctcctgcttttcctcagttcctcgcgacagccccctcgcagtggcggcccgggccctacggcccctcgccgctcgcaggcggtgcgcctccgcccaacgtccccctcgtcgacagccatccgacctcaacctcaacctcgggcaactccgggccgaccgggaccgcctcgagcagtaaagcgccctcggttgagcgcgacgagctccggtcgatgccggacgcgacgttccttgccaaccgggcattccacctcccgatgagcgccccgtgtgagagcatcaacaggttcgcgctcccgaacggcgagagcgtcagctgtgtgctctggtcgggcctctaccacgtcacaggcaccgacatcggtccgtccctggctttttccttccgttgcccccgcctcacctcaattgaccgcccttcctggacagtccgcgccctcgtcttccggttcgaagccttcggccgacccgtcgtcaacatgaagaagtttgaggagggcgtcttctctgacctgcgcaatctcaagccggggaccgacgcgtgcctcgaggagccaaagagccagttcctcgacctgctattcaagcaccactgcattcgaacgcagaagaagcaaaaggtcttctattggtgcgtctggcccattcctaatctctgtcggctagtcgatagggctgggtcggtcggtcagaggctgacaagatactcctatcccgcaggttctccgttcctcacgaccgcctcttcctcgacgcgctcgagcgcgacctcaagcgcgagaaagctggcggcgagctccggccaaccaccaaggtcgtcggcgagcccgcgcagagcttcacgtgcgcacttttcgctcacacctcctgcactgagcgtccgcgtctgaccacttgtctccatcttcgccacggcgcgcaggtacgacaaccgccggagcctctacgagcagtttgccgccaagaagagcgccgagggcagcgagggcgccgtcaacgatgaggtacgttccgttgaccgactggcgacagtagcctcggagctgacaccttttggccctcgctcgcagttcaagcgccagatgggcctctcttcggcatacaatgggctcttcgctccgcagcagacctacaccaccgcgcccagcgacgtgcttgaccagggggcttacggctatcagccctcgccactcgactaccacagcggcctcgacggcggccaagctctcgtgccatctgcgccgagcgcgaatcaggcttacgctgagcagccgcctcaggtgccgttcgcggatccgaatctcgacccttcgctccacccgcagggggccgaggcggcctaccccaagccaccacagcatcacccgtcgtacggtccaccgccgccccagcagccgcaacaacagcagcagcagcagcaagcgcccctctcgtcggcgacggcggccgcctcggcgctcaatgtcaaccttttcgagggcagcccagcgtacaaagcccggatccgcaacccgtcgacacgggccgcgaccgctgcgagcaagggcaaaagcaaggaggcctcgataggacccgcgggatcgatggccccgccccctgtgccggcgccggcgacggcgccgacactcgatgccgctgctgccgcgcaggagcttgctgacggcgacgagctcgaccgacggatcgagcgcggcggaagcgaaggagtcgagacgccctcgagcctcatgctcagcatgatcggcggcggcgctcagcaccgtaactcgacccggctcggcagcatggcagtggcgtcggcggcagcggcgtcaggcagtggctcggcatccaagccgtcaaccgcgccgccgccaactcaggtgctcccgccgggcgctgagcgtgcccgagtgacgcgcggtcggaagcgggcgcggagcccggcggcctcgacctcgcgagcgacggcgacggcacctgtcccgaccctctcgaagacaatccagtaccagcccggccagccgatcctcggcgccgacgggcagccgatgccgatgatctcgggcccgacgaccatcatcaacggtcgggcggtccctgcgacgacgcgcggtcggctctcgctcactcagcaggctcagtcggtcattgcgccgatcctcgacccgcagaccaaggcgcccatcatccccgtcatctcgcacaaggtcgcgccgacgcccccctcgcacccgggcggtgtccggacgtttgcctgcccgctctttacctgcggcaagcacttcaagcggctcgagcacctcaagcgccacgtccggacgcacacgatggagaagccgtacgagtgcggccggtgctcgaaaaagttctcacggagcgacaatctcacgcagcacatcaagacgcacgagcgcgtcgaccgcggtgagggtccgggccacaagggcgaggacggcagcgagggcgacgaagacactgtcgtcgtcgcaaagccggctagggccaagcccaagcggccgagggccgtcccacgtaagggcggcaagcaggccgccatcgtcaaccaggtcaaggctgccgccggtgctggcagccggaagcggcggcgcgcgagcgaggtgactgaggacagcctcggcgtcggctccgaggacgaggacggcgggagcgcggccaccggcggaaacgccgccggcgctggatcagacgacgacgactcggggagcgagagcgggagcgaggacgagagcgagccatcggagcgcggcggcgggccgagcggcgctggcggtcacggccggcaggcgagtcaggcgggcgtgcccgtcctcgaccgctttggccgctacccgccgcccgaggcctacggcggctaccacgtcgtcaacggccgcaaggcctattatgccgcccaaccgccgccaccgccgccgccgcagggaggctacgccattcacggcagcccctacgctggcgggcacgcggttggccagccaggctatcctgcgccgcacggcatggtgccctacccgtcctcggtcggctacggccagccctatccgtacgctccgccgcaggacggctactactacgccccgccgctgccgcatgccggccagtcgtaccagccgccgccgccgccgccgcctccggccgcccagcaagccgactacacggcccggccgctctacccagagccagagccgctcgctctccagacgttgacgttctcgcagccgccggctgcagcgctcgcttccgtcggcccatcgtcctcgaccaccaccaagagcccaggggcgacgacgactggcatcccattcagcagcggcggtgcgatgccctcgtcgactttcatcccgcccccgccgggcttctctggctcgagccgttaccgccaagctgtggctgccgccaacacaagtgcctcgggcacccgtgccgagtcaccttcgacggccgctgctgccgccaaggctggaggcccgaccgacggagccggaccctcggctggcgggacgccgtcggaaactgctgctgcggcgagcgagggcgacggcatcggtcagtcggcccccgcatcgcgctcgctttccaagggcgtcgagcagctcgaactccagaacggcggcgcaaaggcaacgtcgacagaaaccagcccggacgagtcgggcgcgatggaggtcgagcagacgctctgagggagcgcggccagccgtcgctgtcgtctcggacgacctctgggtatcgcagacacgccgacgccacggcgtccataccttcatccttatccgccttccacagatagtcgcgcctccaggcatcatggacccttccccctcgttccgccgcgttatcccttcgttccatcctgtattcacgttcgagggcctttcaatcctttccgatcgcgatgccccccttctcccgcttttcgttgtcctcgactgctcggccgagatacatctcttcatcgtcttattgtggaatacaggcgcgcagacaggagggatacaagccggcttgcggctggcagggtcaaagctatagtcgggtgccccttacgaggtcggtgccgcctgctcctcgccaatgacgatgctgtccttgcccttctcgacgccggctgactgctcagcctcacggatctcgtcggcgacagcgtcctcgacgacggccgcctgcttggcctcagcgggcgcctggacgtccgggttggcctgaaggatggccgagcgaacggccgagatgacattgtcgtagatcgggctcgaggtggcgatgacgccctgcagcgatcgttagatgcgaggtcagctttgactcttcctgctggctgggagcatgcaggacgtacgtcgttgctcttgagcgtgcggccgacaccaaagtcgagctcgcggccccagcagtcgccgaccttgccgccggcctccttgacgaggacgtagcccgaggcgtggtcccagaccttctcttggtaggccttaccgcccgagtactttgtcggcacccggaggtacatctcgccgtcgccgcgggcgagagcgccgtacttcgcctgggagtccatccggaggtgctcgccaatctcgatcgaggacgagatggcctcgttgatggcatgcgatgagtgcgaggcctccaccgactcgagaattgcgtgcgagccgaccgtcgatgagtgggggaggttgatcgggacgaacgggttggccgtgcccgactgcttagtcgcctcgggcgagaggtcgagcgggagcgtcagcgagcgctggaaggcgccggcgccggcggtcgcgaggaagaaggagcccttggacgtcggcgccttaagcgaggggaagggcaggttcgggcaggcgagcaggccaaggacggggacgccctgggagatgagcgtcaggcagacggcgtactgctcgccgcggaggaagcctgggcgagcaggaggtcgcaagagaaagtcagcgccggcaccgtttggccagaagagcagcccgagacggaccgagcgtgccgtcaatggggtcacacgtccaccagcggccgttgctgccgccctcgctgttgccgcggtcgatggcctcgaggacctgttcctcggtcagggcgtcgagcttgctgccgacgtcgccgccttcgagcgcgagcgcctcgttgacgaggcggacgatggtcgagcgcatcgaagttgcctgctcggccgacgaccggagcgaggtcgtgtcctcctcgccgatgagcgggtccgaggggaacttaaggttgaggaggtgcgagagaagcgcctgcgaggcgtagtcggcgacttgagcagcgggattaattagctaacagctctgaaacattggccagcccagagttggccagacgccgacacgcaccagtgacagggctcttgtcgaccttggtctcggtgtcctgctgcttgagcgagctctggaccttgtgcgtgatgaacgaggcccggatgacggcctggacggcgaggcgggcctcttcggcgtactcagtcgaggtcgggatgacgagcgaggacgacatgctgctgacggtgacgcggcggagggtcggtggggcagagaggaggccgagcgaggttgagaggaggcgagtcgaggcgagggggagcatacaacgaggggctgagagtcgtgacggtcgggaggagcgatctcgccctacgcagcttcccgaaaaacgcctgccctccatgacgtgcgcgcgcaacctccttcgtcgatcggcagcaaaggccttcattgattcttgttttcacgttgccgtgcattgcgagcgttgcgaggacaggaggggatacatgtgtgtgcggtcggggttgattagacaggtgcgacgccagccacgcctctctcgtcgaggccgcgcaaggacaggacacacgccgacgacctgcctccctcaatcagcctgaaaacaaggccgaacctactcttcatatttcgattttagtagtccttcttctgctcgggacgaagggcaagcatctggtcagctgctgttgatgaaggtctgagtgcaaagaggccgcaccttctcgtccatcgagatgccgccggggccagtcgtaacgagaagaagaagaccgccgacgatcgagagcgtctggaagaagtcgaagcggaggtagtccttctgagggtggttcgggtggacgctccaccagttgttgatgaggatgttggagatcgagagcagaaggacgaggaacgtcgcagagtactttgccttgaagccgacgacgaccatgatgcaggcgccgaggccgacgagcgagacgagcacgcgcgcaaacgaccactgaccctggaagacgaagccgatgaagaggaagatgaggaggacgcggccggcgagctgaaagctgcagaggcgcaaagagaggggaaaagcagtcagccggtaccgacggcaggtagaatacggaggctggcggacgcactatttcttgcggtcggtctcgctaaggctaggcaggccggcccagagctgcttcttggcaccgaggctgtcggagagaaccatgagcaggccgccgatgaccgagaggttgcggaggaagaacgagaggtcgaagatgagaccgtagccgagcgcctgagcgacgacgacgccgagcaggccgccgacggcgtgggtcggaaacttgcgctggatgaccaagaccgagcaggtcgtcatgacctggcggggcagcgagggacgttcgaagtagacgacgtcagcgacaagcgaaggaggacgagctcgacgacgagggactcacgatgacgttgatcgtcaggaagaggtgcgagatgccccaagggaagcgccgctggctgttggtgaggacgacacgcgtgaaaccgccagctcatcagccggctgcagcggacgcaagggacgagacaggagcgacgcacgtctggaggtaccacagctggtcgctgaactgggtgaagatgcggagcgcatcctcgaggaaggtggcgacgatgaggaacctggcagcggagaggagaggacgcgaccggaaggaggtcgtccaagtcggaggccgaggcaagcgcgagagcgcggggagagcgggtgaaaggaggtccaaacggtcaacctggctgttctcaagagcgcgacgttttcctgccagatggagctcgccctggtcgcgacctctctcagggctaggccagtcaaagctaagcgaagcagcgggagccgcacttggctagtgatggcggcagcagcagcccgacgtcacgggccagccatctcccccccgactggaacaggagccggagaagaagctcgacgaacctcgagagggccggcaggtagggcttgatcgggtgcgtcaggttttcaatcgcgtcctcgaccttggatgtgaccttcttgacgccctcgagctgcgactcgtccatgccgagcgtcgtcgccaggccctgcatcgtcgactgctggcggcggtggcctccgccggtcgacatgggcaccgacggctgatacgacggctgatgcggcggcgccgactggcccgggcggttgatgttgatgcgcgaggtcatggcgaggcagagacggacagagaggagagaaagagaaagggagggcaggcaggaggagatgatcgtctgagggcggccagcagcggagagacgctcgcacgctggcaagaacaccgccgccgcccgcgcaaagaccggccggctcggcagcaggcactcttgagctagcgacaggtctcggcccttcattacacgcacgcacgctcgctacacctcgctccttctcgtccttcgcagcgccatgtcggctccgtcacccgcgcataacccctcaccgacgctctcgaggcatgccctgttcggcggcggcctctcggccgagctgccgtcgaacctcatcgacgccaggtgcgtcatccgtgccgtcggccacgaacgacggcgcgggctgggatcgaaacgagaatcgccctaccatactgaccgaaccggagctgacattcacttgggatgggatggacgcagcgaccttcgccagatccccgacacacaggaggtctggctaagccccgactcggacgtgacgttcattgtcgagatcctcgaggccgtgcccggctccgacggccagagctcgctcgagtgcgtctctgcctcttccttcgctccgcgccttcgaccgcgctgacggcgagactctctcgcagtttccactttgactcgctcgcgcacgacaacgacgccctgtcgtcggcggtcgagtcgagggtcgtgcctggcgcagaggtcgccccgccggcgccgagtccaccaaaccagccggtcgcctggacgctcaagggccggcagtcggtccgcaagttcaacaagacggaggaggattccgtcgcgatcctgatggccgtctggcgcattgctggtgcgcgatctcctctattcgcgcgaatctggggcgacgtgcgacccacggcgtcgtgcagtctcgtgcgcaacgagtcagatgtctgtctgagtgtagacgctgacattcaacacccaatccctgctccctcggctcgcaggcaagaacaccgacgttgtcctcacggtcaactgcccaaccccggcgctcgaggcgttcgccggcgcgatgttcgaccgggcggtcgccggcttccgggtcgaggactgggggctctttgcaggctgagcggataggccatgatctgctagcaataacgcccgcaggtcaggatgggggacggaagcgcaccgacggcggccagcaaccgacagagaagccgagcgagggaccgggcaaacacgtcagacgactaacgttatgcgccctcactaatcttcgcgtgtcagcttagcatcggctcggcaagccaacagaggaaaagaggtgttgcttctgtatgctgcaggcaccgctcacaggaggggcaactcgctcgtgcaccgaggtctgttgctgcgcgtcgccgcttcgcgtcgccccctgtcgactcgccgtcgctcgccttcctctgctcgatctccgacctgcatccccttccgatgcctcctgccctcttgtcacctccagccaggtcgaagccgacgatgctcggctccatcagctactcggtccaggccggattcctctgcccgctcgcgttcggcctcagtctgccgattgccttcggccagacactcatccagctcgccgcctcgccaccggtccgtctctcctcttctagctgctggcacacaaagtatctctctccatgtcgtcattctgacatgcctgccgcctgcagagggcagcatcgacctccgcgtcgccgccggccggcgaagcaaccgagaagaaagctcctgagatgctcgtctcgcggccttccgttcgtccgccttctgctcgtccatctccaagctcctagctgctgacgagcggcttcgcctgcctctttcgcagaatggcaagtggcgctggagcccgcgctcgcagtcgctcacacccgtctcggaggtggacgagccggtctcgatccagccgtcgcccgagtcgtccaaggtcggccgcttagacctcccagctgccgtctttggcggcgagctctttggtagcccagtcgacaatctcgaggcggagatcaaggacgaccaaagcctcttcgtggctggaccggccaagccaagccggccggcgcagatccggcgcgtcacttggaaggacgacgacgaggaaggcgaggcgaccggcacgactgacgagcgcaagaatcggccgaagaccgagacggccgacgaagagccggcgtctttctatgaccagcgtccgcaggctgagtctccagcgacggttgcttccatcgaggttccgaccgtaggtagcctgcgcttgggtcatcgcgcttaagcccttgctgaccgtgactttctctcatcgtcgccctcctggtaggtaccgcacaactcgccggtcatcgccgctgtacccatgcccggaatagatctcggcctccaggacgtccagctagcgatgccggtacgtgtcgagcttgaccttcagcgtcgccagccagtggctgacttgttcgaaagggtggcacggtcttgcgctggcgtcggacgcagcacgcctcaccaatccgctcgcaatttggcacgctcctgaccgacgactcgccttcgagcggcccgatccggctgagcaacctctaccgaagcttcagcgacccagaggtgaccgtgcgtcttcctcgcgtgcttctccagtctctatcgtcgattgcccttctgaacacctgccttggctttatattcatcgcaaggaggacattcgactcgagacgccgtcgcgccatgagcttcggccgaccgtgtcgcagccggtcggcagcagcagcagcagcgacgatcctatcccgcagctgcctttccggccccgaaccccgacctttgtcgacggcgacgatgttcaagccctaaatgcccgcattggcaacagcttttcatcaggccgatctcacatcgtccagctgggcccggctgagacctcggcgccggcgacgatcaacgcgccagtctctccgaccttgtctgccgatgaaggacggctctcggaccaggactcggttgcggtcgtcagtctttcatctaaacatggccctcgccattgaaactggctgacagccttgcactctctgatgcccctctgtagctcgtccagtcgggtgtcgagatcgccatcatgagccagaccgtcagcggtcagcagcaggagacgtacgagggcctcgtcctcggctccgggatacagaatctcagcgactcgctcgacgagaagcgccaggaccggcggtcgtccaaggccgaggcgggctcagaaacagagcgcgatgtcgttagtctctatcggctcgagctttccaggctgtactcactgacaatccttctgtcctgcttgattgagcaggctgccgagcgtcagggccagtttgcgcgcgtcgaggggcttccgttctccgcccctgccgctgatacctcaccagctggtgcgccgacgccttccgacctcgtcagcccctcgtttttactctggccttcgaattcaaagcgctgactgtctcgtgctggcttcgcagttccctggcctacccgtgttctcagctggagcgtacgagctgggtcgcgaccgcggacctatcgtcgcagagggcctcgtcagccccttctctgtgcgcctctctttctctgcctctcttcatcctgtgctgccagctgattctcgccaacagctttcggccgccgagcaggacccggtcacgtcgcctaccttgctgccaagcagcgcgcttccgctgtcgaagccgcgctcgccctcgccagcctcggcagcaagcacgttcggctcgacactgaccggtgagcatccaagcgatgcctgcgaggaggcttgaggatactaacttgatgggcttgtcatcactgcaggccccaatcaccagtctgcgctctcggtgctcgacgaagagggggccgccgccagactcgaggtcgacgacgacagcgatgacgaccagacatctgtcgcctcgatgcgcatgcctgaggttggagtcgcacctggtcatctgctgacaccccaggcccgtgagtctctcggcttggctttcgcaagtgcctcgctgatattatcgatcggcctcgcagcgcccgaacagctgagtggcccttttaccccgacgccccgtcacccatccgtcggcgcgaagtcttcgaccgccgaccgcacgccgaggacgcacactagctcgctgccggccgacgtacgttctgccagatcgccagggtgctgtccctctgacgctcgctgacagttctcactgcggtcgccagaccttcacgactctcttgccgtccccgccggagtcccccgaagacctccagccacagagtgggcgtccgccgcagcctgagcgggtcgatttggactggctgcctgagccctctgaagacaccccgcacacggaaacgaccgagcgaggccgcaacccggtgtacagcccggtccgggaccgccagccctcggtcggctcgttcgaagaggtcctccgcggccagcgcgagagacttcactctgacgtacgtctagcgttctcccgactcccgacttgcgagtactcactcgtttcgcctgtagacgccctgccagcggcccaactcagacacgtcgacgtcgtccgtcctcgcccaggccggctcacctacgctgccttatttcctgcccgcgtcaaacacgacggccggactcgcgccctcgccgacatcgtcgatgctcgccctgcccgtcgctgcgctgtcgccggcccaggcttccgccgaactcgtttcgccgctggcgcactctgagaacgggcgcggcgggatcagtaacgtcgccggcggttcggtcgacgaaggcaagcccagcgcgacaaagaaggccaagaagtacgcgaagaagagggccaagaaggaggcggcgcgcgagcaggctgaactcggcagggcactggctccctgagtgcgtcaggcctttactcccgtctcctctcgctcgattccctgctcctgctctgctgctcagcaagcggctctccatcacctcccgtctcgctcgcctttctgctcgtacgcctcatccctctctcctttccttcgcctttgagccccccgcgcttcgcaccgtcacacgtacgttcgacacgaaacgttgggatgctcatgtcatgtcattgtcgtgaaggcatcgtcgtggcaagagtgcaaggtcgtggagggcgcgaaaaggagaaaggaagtcatgggccgaaaggcttcggctggaacagccggatgtcgacgggcacgtcagggccgagcgactgggcgagcgccttgagatactcggggttctcagcgatcagcatacgcttggcggcctccgacggcgggagcacgcccgcgcgtgcgttgacctcccgccgggccttcggaagcttgagatagtcgggccggtcgtcaaagctgctcgtcggggtcggaaggaaggcgtccttgaccttgcgaaggaggtgcagccaaagaccgtcccaggcgagtcggcgagcggcaacgtcggccgattgacctgccgccgcttgcgagacggacagaaagtgcgtcgagagggtgagggttgatgccgttgctgaggagttgggcgagccgccaggcggcgtggccatcgagaggtcgattagacaagtgaagaactcgtccggtggctcggccatgtcggcatccgcggccgtcagctgcttgaccttccgtcgcgcggcccgagaccagctgtgctcggtcgtgcggacgacgagacccgtgacttcggtggcggggtcttcggagctatgaggctcagctgagacgcccttgagctcggtcagacatggtacgaggaggtcgagcaccgcctggcgatcgatgtcgaccgacgctggaaagtgaaaggcgtgcgagtttgctgaaggaaggtgcgggagcagcgctttactcggtggccgaccaatcgactgcgcaacgagaacaagtcggatcagcgccagcgagcaacagaggagacaatttcggacgcgcgtcgggtgcgaagaagcggtcgaaagaccagccgacgacccagcggcgggtctggccttgcatgaactcgtggaggacatagttggtgacgccagcctcgcgcagcgtctcaacaacggctgggaccgacgagaacttgccgagaagcgaagtgaaccacctggacagactcaaaggaggggcgagggtcagatcagatcagcgagatgaggcagcacgcgtaatgacgagcaacgagcgcaccgacacctgtcgcgctggccgagcgattctaagaccatccgccggacgaaggccgactcgccaccgggtgtgatcatctctgtctcggccccagtgcagatctgcaaacccagctgaatttgagcaagtggacgacagacccaaaggctttaccaatcggaaagaaagtgggactgaccgcatgcggggcgacggccttcgtagctgcgagccggtcgatctcctcctgcgagtcgtagaacggcggattgcacatcgtccactcgatcgcatgctcgccgagcgatccaaagagcgaatcgctcgcacgagtctcgacaagagagatgcggtcgctcagaaagttgcgcgagatcgtcccgcgggcgaggtgggcagaattggggtcgatctctgcggcagcagcggcagcagcggcagcagcggcagcggtcagtgtcggcacgcgcaagtctgccaaggtggccagaccaacatgagtcgcagtggagtatgaactcggacgcaccggtggcgacaaaggaccagttcgccgacagcttgcagccaagcagaggatagatgaccgtcgagccggtgccgacgtcgagacccttcgccggccgttcggcgcgagcctcagacggcagggccgtcgagcggaggaggtcctggatgaagaggagatagtcgagtctggataaaaacgaggaggacgtcgaagggtcagcttccggatcagcgagggacagctggcgctcgacgacgtgggccgagcggcagcgactgcgccgacagtacgtcagacgacgcacctatttgcgacctgcctcacgagacgacgcacacggcatgccgcggtcagcatgtgcagttcaaggcagctctctgagttgatgaggttggactgacagtcgggcagagcctgtcctcccgaagctcgacgtcgagcccgaagccttccttgaggaggcaacgcgtcaactcgctgcgtttgagcccgttcagtgcgaggcgaccaggaacaggtcagcccatcgaagactactccagaagttcagcctaggacttaccggacagcgtccgcccgcttgaagtcgatggtcggccggccggcgcggttcgcgaagacgctgcgctcgcgaagggggccgggtcgaaggtcagctctcatgctatagatcccgccgggcagaagccaaagctcggcagcgatgactgacaatggcgccaaggacggctgggcgacggcgagctgcccaaagtcgggcgcggcgaggaggtacgggttgcgaggatgcatcgtctgcgagctcgctgagcagcgcgtgcgacgagtccggcgggctcgaaagctagctgcggcgctagcaaggtgcagaaagccggcgagaggcagagcgcgctgtatcggcgccctcggatggagaagtcgtcggactgagctcggaggcggcgaagaggcggcgaagaggcggccggccgagggagatcgagctggatgagggtagctccgacgcgtcgagagctcgaggtggagtgatggtccaggtggtggaaggagacgggcgggcggggcggcgagtagagttcgctgcgtcaggctcaagtggggaccgctggattgagtgtcgcagtcgggctcgggcgcgatggtgttgggacaggagtcggtggtgggggcgggaggcgagaagggcacgaccgttgttcgctcgaacgcgctgcactcggaccctgccctccctcacgtcttcaggttcgtccgctttgctctgctcagaacgcacgatcaattgaggcgagtggcagcatgcatatatgcgcagacgcttcctctattcggtcgctcgtgaggcgcctcgcctcacatgccctgctcgacgagccaggcgcggacatcgttccgccacgagcccttgatctcgagctgcttgctcgtcgggttcacgcgaccgacgacgcccttgcccgcccgcttgataggcaggcgagcggcactgctgctagagtctgttggcggaggtgacggggcggagcgaatcgaccgattgggaagagtcgagaggtgcgccaggagggtgtggaggagcgtctgcaggtgggcgacaaaaggggtttgcgcaggagatgcggcatccgatcaagaggccgcaagtgagcgagggcggaggcgacagtcagcgatcgaaacgccccgagagaccgaagcgcagaggacggacggttgagttgccctcgacatggcggacgattgtgatgacccggtctcctccgcgcgagacctgaacaagcaaagaaagatgatcgagctgatcagcctcaaactcaagtcctggcgacgctagctcggaccagatctgaggacgcacatcggtataaaccggcaggaacccgctgtgctcgacccggcgcacgtaccactcgtcgggcgtccgaccggcggcctcctcggccagagcagagagcgggttggcgaaccaggtcggcgcctgctcgagctcgatctcggcatcctccggtccgagccaggccgagcgctgagccttgcgcccaggccgaagcggcgcgttgagcggtgagggataggtctgcggcgggagggccgggtccgaggccctcggccgccaggtcggatgggcagtgagagtggcaaggcgctcggcttggcgcgaggaaagcgctgctggcggggcctgggcgaacggctgagcgttcgtcattcgtggcagcagccgagcagccgtcgggcggaaggcagacatggtcgggcgcgagagaaggcgaggagcggcggctggcggggcgctgactgcttgtggccgatgactggtcgcagcggatgtggatgcttagaatgtgcggaaaaggagggaggggccggcaggtggcgggttggaagtgctgagtaaggttgtgtgagaggcgaagttgccgggtagagcgaaggtcgagcggcggaggaggagacggagagagcggccgggggccaagcccaacttggactgccgtagaccccgagtggaaatcggcggcctcgcccgcgcctccgactctccacgtcagtcgtcgcgctctcccttcctcgcctcaaccatcctgctcgctctcacgcctcgcaccccctctcatgcccaaggccatgtccttgtccagtaggtccttcatggccgctgagctcccaacgagtccactgacgactgacagaagccttgcccgtcctccgcctcagtcatcatcaagcacgcaggctcgagccacgagctcaccattgacctcgcccagccgggtcgcgccctcaagcagcagatctacgaggcgaccggtgtcccgattgatcggtgcgttgtcacgatcctattctgtccggcatctctgtgaagaagcgagcgcttcagccgaagcaacggcttgcttgagcatcatcgcacgccgagcaccatctggcccaggcgatcgcagcatcttcgtcgatgaagcgttcagcgatgaagcagaggtgatggcgacgcacttggcgaagcgactctgaagctgacttcctgcgcctcctgacctttgcggttattctgtcaatcagcatgaagggtgcgtgtgctggtctccgtcgcgccgcagcccagtcgctgacgctgccgacctgcttgctgatgctgcctctcgctcaccagtcatgatcaagggcggtatgctcaaggatgacgccgaccttgccaagctggcctttaagccgaaacagcagatcatggtcatcggcaccgctggtccgctgcccgaacggccaaagaccgagaccgtcttcctcgaagacatggacgatggcgagcttgcgctggcggtacgtcctggccggctgcttagaagatttgcctttcagctcagtaccctgaccctctcggcctgctcgccttctcggcggtccagacgcggacgccagctggtctcgtcaaccttggcaacacgtgttattttgcggcctctgcccaggcgctgcggtcgatcccttcgctgaacgagtcgctctcgactttcacgccatcagcggcgacatctggcagcagtggctcgggcggttcgccccagctggcgggcgcgctcaagcacctgttcaacggcatggcccagacgaccgagggctacgccccgcaccacttcctcggcgcccttcgccaggttgcgccccagtttgccgagatgggtcgcggcggcggaggctacgcccagcaggatgctgacgagtgctggacgaccatgacgaacgcgctccgggcggtccccggctcgacgacaggcaagagctgggtcgaggagaatatgatgggctcgatggtcaaggagtgcgtttctgcggaggatcagcttgcccgctcttgactgaccaatctgggtgcccctttctcaggctgacgtgcgatgaggcgccggatgagacaccgactcgcctgaccgaggctgtcccgaagctcgactgcaacatttcgattacgaccaactacctccaccagggcatcctcgcctcgctcgaccagaagatcgagaagaactcgccgacgctcggccggacggccgtctacacgcagaagtcgcggctcgagcgcctgcccgatgtcctgacggtccacctcgtccgcttctactggcgtcgcgacaccaactccaaggccaagatcatgcgccgcgtcaagttcccgcacgagtacgacgtgctcgacctgtgcaccgacgacctccgcaagcgcctcagcccggtcaacgctgcgctcaagcaggtcgcgaaggaccgggaggagcgcgcgcggatccgcaagcgcgcacgcacggccgcaaacaccaacactgctgcggcggtcggggccgcgcaggctgactcggcgacggatagcgcagctcctgcggcgtcggcgaccgagggtgccgagtcagttgaggtctacactggcacgccagaggaggaggctgcgaagctggccgaggagcgttccaagcttgctagcctgatcgacgccaacctacggtcggacaagggtgccaacaagagcggcctgtacgagctcgcagcgatcgtcacgcacaagggcgcgagcgccgactcgggccactacatcggctggggtgcgtctgtgctactcgcgtgccactgtcgctcagtgagcatgctgacccgtcgttgccccgcccttcgccgctcaatcagtcaagaagcaggccgccgcctctgcctcggatccctcgaccgttcacccggtcggccccgtaagcgaggccgatgaggagtggcataagtttgacgacgacaaggtctcgatcgttggccgcgacaagattggctcgctcgagggtggcggggaggactcggccgcatacattctcgtctaccggtgcgtcgagtcgaccgcatgctcgcccatggtagactgacctgacctgggttccttcgagcgaaaggtccaagccgctcgaatagacgggctcggcagctgcgagacggttgcgcgtctaccacccacgaccgcagctcagcgtagatctgcagattgatggcccatcaactcatttcaccgtcgccgtaaggattgtcggtgcacgtatggcgaggtcggcgcccagtgctcgagtcgtgcggcggatgcttcggcgacaggccgagtcgccctgcgcccttgagaccgggcatccaaagcgcaaggacctgtccctgaaagtctcctctttttcgtggcctgttgcgcaaatcgagctgacctcatgctctgaaatcacgagttgcaccgtggtccttcggccgtacgcatggcccccgtgcgcgccgcgaagcaggtcgcgtcgaccgtcgctgcggccgcctccctcccacctcgacctcgaccatatctcttgccacatccctcgctctcgagcaagacgacatgcgacgctcggcacgacttaacgctcagacggctgctgccgattgccagccgacgactgttgcggcaggaggagaaggcgctggtgcatcgcctgccttcctctttggagctcggcagcccctgtccttcttgccactgcttcatagctgacacgcctaacccacgcttgctatttatctttagcagagcctcctgcaactggcttcgacccgagcggcccggcagcgaagcggaaggccaacggaacgtcatgccgttcgtcatctgactgcgcggacgccactgaggtccttctgctcgactcgaaccgaccgttgcagagatggctgagtcgttcaggccgtcagccgcgtacagcgagagcgccgaagaggacgatgcttcgccgccgccaacgaagaagaatggaccggccaagaaaaaggccacgaagaagaaggtcggctcctggcatgcgcacctcgcctcgcccctttgatcggggggcgcacgggccgcgttatgcgcgagctgacacgcctctcgctccctcggctcgagtagaagacttcctggctcgacctcaccaagccgtcgaacgtcagcttcgacaacgtctcgatcgaactgctcaacatgatcatctcggtcgactcggacctcggagtgcgtgcaccggctgcagctgcgactgaagcttcaaccaggtcgccttgctgaccctgaacctctctcaacagctccgggaccacctcacgcctgccggcacctgccgcttcttccgcgcgtgctacaatgacctcgtctggcaggtgtgtccgaccccattcggtgtgtggggctcgaaaggggcgagcgctgaccctgtctcttttcgtcgctcaggtcctctttcaggcgcacgcaccccgatccacctccgatccctacgaggttctcgtctgccggctgccgcagagggcccgatggctccagacgcatccctcaaatccgatcgagattgacacctacattgaccggcacgttcgcctacagcaggctccgggcagcgagcgctgggggcagtctcagaccgagtgggagaagggcgagcccaagcgggagaagcttcggcaaaagacgttctaggctatcctccattgccccacgacgccccgtgtttataacccagaccccgagatgacgatcgtcgccgccggcatgttcgactttggcatgatggccgaagggacggacgaggaaaagcggtacgtcggcgcaccgagctcaacaagacgggcggctaccggtgcgctctcagctccttcgcagtcgtccgcggcactcttcgagatctgggacctgacgcgctccgcttgcccattctgcagactcgcgcaggtcgaggcgctcgcgctccgcagccaccaggggcccgagggcctcaagcggcacctgcaggccctcaaggagaagcggcgcaaggccgaggaggccaaaaaggccaaggaggcgtgcgtatgctcatccattttgccgctcgaggctgctcttgctgacgacagatgaggtcgaccgtgctcgcctctcgctacagggctacgcaggctgcgaatgacgaggccggtccgagcacgggcgctggcaccgctgcgcaggccagtgcgtctcccttcccccaccccgcctctttcgtgctcgtcagcgtccttctgagcttccctgaccctctctggccctcgacagacgacactccagcgatgagcggcgcggacgacgagattgacctgcctgacggctggccggccgccgatggcgaagacggccaggagggcatgaaagttgactggtgatctttgacgtggtgcgaggaggcgcggcggggagacggtgtgggcgagtgatgcgccagacctcaagaggtgaccggcagagaggccattccagatcgtatgcaatcctccccagtcggcagcgcgcgcgcgcgcgcgctctctctctagtatctcttcgactcgggcacgaaaggcgtcggactttcggttggcgcggcgtcctcgagccggcccctggcgaggtaggtgtcaaagaaagcaggtcagccggcattcggtcgcgagcaggtggaacgcgccggcgcaactgacccgttgaaggtgtacatctcgccctcggtaccgtagaggccgaagcccggccggccggcgccgctaccggggccgccaggccgtcgcgggttgttgaaggggtcgtccatgctcgcgagcgtgtcgtcctcgtcttcgtcagcggcggcacccatctggctgcggcgcggcgtcggtgcgaggctgcttgtcgacgcgtagccggccgggtacggaatcggcggcagtggcgcaaacagcgagtcgttggcagtcaggttcgggttgaacgagatggccgagaggtcgaccggcgggccgccgtgggcaaacgagtcgtgctgctgcagccgtgagtcgttgaacggcgccggggacggccctggcggctgctggcgatcatcgtaatgcgatggcggatcggcagcgaacggcggccggccttcgtcaagcgaatcgtcgtcgtcgtcgtcgtcgtccgagtcgtcatccgaatcgtcgtccgagtcgaacgaccggtcgtgggtcggggctaagctgtggctggccgacatcgccgagccggcacccgagacgtacgagtgatggctggcggaagcgctgacagcggaaggagcgcccgcctcgaaggtctggtcgaacgaattgtcatcgtcgtcgtcgtcgcggtggtcgacccggccggccggtgaagggttgtagggctcgacgccgtgaaggccaagcccatcgccggcggcacgtcgatagtcctcctcgacctgccggacagcgccctggacaacgtcggcagcgacgagccggtcgacgactgcggccgaacctccacggaggggcgggagcgcgaagttcatcgtaactgggggcgacatacccggagggaggaagtcggcgtacgcgcccgagcggtgaggccgagcgccgtcgttgtcgtcgtcgtctgaggaggaggaggaggacgacgacgacgagatgtcggccgacgaagcgcgtgagtcgggcgcaaagccaaacgtccgctggccggtcgccttgctcgtcgacagcggcgtcttgcccaggtcggtcaggccagtgtagccgcggccgccggccatcgccgacttcctcggggtcaatgccgcgcccgctgtcgagggtccggccgtgccagatgcagagccgaaacgaagcgcctgaggtcgagcagcagccgccgtcgctgccgtcggctgggtggtttcgtacgtcgagggctgacgccctggagccgctgccgtcgacgcagcgagctgggcgtcctggtaggccgcatactcgtccagcgagtaagcctcggcaaagctcgcatcaggcgagtcgatgtcgtcgtcgttgttctcctcccaggtctcacgccggccgccgctgccgctggcgatgggtcgtggaccagctgccgcagacgatgatggaggcactagtgccccctccggaagcgactggccgaagaacgacgagctctcgccggcgctcgcgccctcgtcgacctgcgagaggtcgtgtccgcgtgccgaggcctcgggctgctgctgttgctgttgctgtcggcggacgagcggcgtcgacgatccgagcccatcgaggccggccaggaaggatcgttcgccggccgtcagttcggcgtgctcctggccgtgaagctcgtcgtaattggccgcagacgcaagccggagcgtcaggtcggcctcgtcgtcgtcgtcgacctgctcagcgtcgtctcggaagtcgaccgaccggtcggcgccatgatgcagattcaagcggtcggcggcagcattcgggtcgtcttcgtcgtcggccgtccggtcggctgccgtcgactgggatgggtgctcgctgtacgagaaggcgtcgggcacgcgcgtgttggctgcaagctcgaaaaactggcgccaaaactgaggcgaggcgcgagtgagacgaggcagaagagcagaaggatggcgtcagtacaggatgctcggttgctcaggcttggttgggcgaccgaagctgatcgctcgagggagaggtcggtcggctacgagagacaaccctgaacgctgagccgccccgtcgcccccatccaactcggatgccgccacggccgacccgagctggccgccagattgattacggaccttggcaaactcgcgcgtcggcgcggcgttctggttgaagcgcttgacggtcgggatcagccgggttgcgaccgtctgatggaggttggagaaggcctcatcgatgtcctgaaggagggcgacaatctgctggtcgatctgctccatctgctgcgagatgggcgcggcggccgacggcgccgacgggagggaggccatgatggtggggctgagctgattgggggagggaggaacggaggcgaccaaggaagcaagtggtcagggaggaagtcggtcggacgcgacgcgtttcgtaactctgtcacgctctcctgcggccgccgtgcctcgtcgtaaaccgtcgcgcgacgctgacgtagcgggcaagcgggcggccggcggaaacgcatctcaccagccgtttctgctgccctcccgaccctcacccagcccctctcctcaagctctcagccacccctgcctctctctctctctctcgcaaagatgactgtcagtgtctgctctaaagccctcgctgtgtcgttcagggagctgaccttctttccttctccagctctactactcgctttgctttctcctcctcgcggccgagatcatgctctcggtcgtcatcctcggaccctggccgcacgtcctccggaaaaagatcttcaccttcctcaacgagaacccggtcgtgcgtcgtcccctccctttctccttcacctctgagtgtgtcgggctcggtcgaaggaggtcgctcgtgtgtgtgacgtcggatgcagcaggcgtctcacctcgctcgcgggaagcggtgacgagcggcggccgtcagctcaggcagggcaggcagtcgtcaaagagtcgtgtccgatgcggcggcgttggagttgcctgctctcgacgtgacactcagctccggggctgcgtccttcgtcctcgcttgacccaagcacaccgcagcttgccgccgggccgaccctagaggctgctcgtatcatctctctcttctccagggctgaccccgcaagctcccctcgcaacgtaccaacaggttgccaagatccagtacgcgctcaagataaccttcatctttgtcgccctcctctttgtcgacgccgtccagcggctcgtgcgcgtctcgcaggaggcccaggccaacaaggacgcccagggcccggccactgacctccggaccgagactgccgtccactcgcgcaaggtccgtccgctttgctaggctaagcggatacacttggcgtcgcagttatgttactgacagccgttttcctcggtcccttaccgcagttctacgcccagcgcaacctctacttgaccggcggcaccctcggcctcgccctcgtcctcgcccggtccttctcgctcgcgctcgagctcatcgagtcgaatgaccagctcggccgactcaagacggcctcagccaagtcgtcccggacggccggctcggccgagcagctccagctgcgcgtcgccgagctcgagcaggcgcttgagaagaagaccaaggacgtcgagacgatcaagagccaggcggccacccaggcggccgagtttgaccgccagggcggcagcgtcggtgccggccgcggcgccgacaagaagctcgactgaacgttgagccgcgcacgcgatcaagccagaacgagcggagacggtcgatgagatggtggcgggagcggctgccgtgatgatgccagagcaggacaagatcgcggagagaagacaccagccagcgagcggatggtggcccccggtcagacggatcgggcccaggcccgcccaccagcatctgtatcctttatgacgtctgctgcaattttcggtcaggcgctgagcgtggatggaagggggcatgatagatagagcgtgctcaaggggaggccgagcgttgcaacgacggccggctgcatatcaccgggttgaggaggggggacggcggctgcccaaggcccgatgcctacttcttcttcttcttcctgcggacgccagaagcgaaggtcagcggggtgacgcccgatgctcgggcccgagcaatggtcactcacatgaaggcagcatggccatcaggtccgccatgcatcaggattgccgccgagaggagagccgagaggcagaggcagaggggtcagggcggacgatgatccgcttgcgcatgatgagcgtatgaacgacgtgccggtacttgcgctgcttcttcttcagatcttcgtcgattgaagcaacccggactgcgtctcgctcctcattagtgaggccgaagtgtgtcctcaccacagcacaaaacagtggatagtacgaggcccctggcaaggatcgtcagatgagaggtgagtgtccgcgcgctcctgcaaggtacggaagagcaggtgagcatattcgactttcaatgagcggggacgagcggatatttgaccagcttgacgaccatcaacctgtggcagagagggagcgtcagcgcatggaaggcgatgtcggctgcagtggaacgcaccgccaaaccgaggggaactgctcccaggagccgaccttgtcccgccggctccgccgctgagcctgccgctggtcgttgaggctgccgagcgacatggcgtcagcgggatcacaccgttccaaggggagcttcgataagctcactagtttgggaaaatgctggcggaaattgacggaacgggggtcagtcggttgaaaggggtgcgtttctcggccactcgcagacactcacctctgctcagaggccgtgaggtcgtcgagatggtgaagtcaaagaggccttgcgcgaccgccatcgtgcccgtcgctacgtcgtagcggcgcaggacatggccgctggcaagaacggccgctttggtctcctcccggtggccggcggagcgactcagcgacctcccgctcgctccgcgacgcaccccagcgaaactcggtcgaccagctcgccgatatgccggccgagatgatgccgcgggccggggcccagccgcgcgcaaaggggtcaaaggcggtcggcagcaagcggtagccgtcagacaaggaatgaacgcgcttccggccgtccgcggcatagttgttgtggtcgacgctccagcccttggtggtgatactgatctggtcgggcgcgagacagaggtcggtctccgcatggaagatgatctgcccgaatgaaggggaggtaggtcagtgtggcacgagcggaggaataggcaagtgcaagtgccagcgagcgcgaggtggtcccggagctgcaaagaggttgaggccggtcagctgttcagcaaggccgacctggcaggcgaggggaagaaaagacacgcacgtcgaggcccgagtcgaccgagatgatcatgtcccagatctcgaccggcagccgctcgaacttgagagtcgaagggagcttcgcgccagtcggtgaactaatagagacgcaagcatgcagtcagcagcgagatagtgaggagggctggataaggcgccgcggcggacgaccgctcaccttgccgtctgcgccgtgcatgtcctcttcttcgcggcggtatcatgggacgagccgagccgtcgcctcgttatcggacgacgccatcgacttgtcgtccccggcagacgtttctgacggccgtcctttgcccgtgccctgggccctgctggtccgcgcagcaccggtggctgctttcttgccgccggcgctcgcagctggagcccaagccagagctcaagggtcagaagccgtcaagatacgcgcggagctgagtttggaggacacacttggcttcttggctcgggtcggcaggttgggggcgccaccttcgtcgtcgtcgtcactgtcgtcgtcctcaggccgcgcaacactcttcttcgccgcccgtttccgcgacctgagcggggcggctgttgaatttgtcaggagcgaggacgaaagcggtgaaagcgtcagtcaaaagactcgagagtgcgacgaggctggcggctagaggaagcgtaccgtcaggggcggcccgcttccgcccctttctgtcggtccctgacgcggccttcgcctgggcacccgacttggccctgaatcctgcagcgagggagggggcagcagcgtcagcagctaaaggtggcctagattactcaggctgatcgcatcgcccgagaggaggggcagagctatgcccgtcgctgatgccgcagagggaagaggacgacgaacctcgcgtgctcctgaccgatcggcgcgatgctggagacggacgagccatgaccaaccggcggcagcggtacctccgccttggccggtcggtgcgagcttgctggagccggtcgagatgcgagtcgagcggcgcatccttgcggggagaagggtggtgagatgctgatggtcgagtggcagagcgaagggtccgccctcgccgccgcgttggctgcggccggcttcgcggggtcccgctacatgcgtcctggcgcaagtgcacttgcaggccggcagcgctctcatcccctcttgcgttcctcgcttactcggtcaacgacgctcacggagcaaaggatctcccgtggccgcctgcgagggggcgacagtcatcaaagaatcgtggtggccaggcagcgacaggcgccacggtcgagacctgcttcaccggccgagggtgctgatgatcgcctcgacctccctcttgaggagcgtcgtcggtgcctcgctccggagttgcctgagggaagcaatggtgtcagttttgaaaggagagcgcgggcccaaagccgctgcggacgcactcgagtcgggccttgtcgttgcgctccttgcactcgacggccgctttgctccagtcgccgcacttgacaaataaatcctgcggaggagaaaccagagcgcttgtcagcgacggcgccgagggtaagactgagacgatgggcgaggcagctcaccacacggtgtttcgcgtcgcaccgcggcacgtacttggccgcctcgcgcggatggcccttcgcgacgaggtgggtcacaaacggctcgtaaccgatcgggctcttgcgtgccttggcaaaggcctcgagcgatggccagtccttgatctctgtgagcgcctgcagcttgacaaagtagaacctgccgggcgaggcgagaagattggggccgacagtcagcaatgggtaaattcgtcgaccgacacctgggcgggacgcaccggcgatcagggaccttaaagtcggcccgcacccggtccgccttctttgcgaggccgactttgagtaggacgctgatggtctcgttgacgctaaggccgacaacatgcaggcccatctcgggctcggcctccttctcgagcgtctgctgctgggcgagcaggcggtaggcctcgtccatcatctgcaaagaagtcagggtcatagagcgaggagagccgagaaacaggaggggcggaccttgctctcgaagccgaggtctcggtcttcgccaaacgttttaccggcgagcttgaagctcgcgagacgctcgacgggatcctagatagatgcgtcttgtcagtctgcagtcgctgagcaatcagactcgcaagcaagacgacgcacagtggccagggcagcctcctcgagcgcgaggagcgcaccctctcggcgccggtcgtcctgccagtagaagtccttcagcatctctcgctccttgccgccgccgaccgcgccgccacgcgagtcgaggtggacggcctcgctatcgcgcgcgtagacctcgagcagcgccgaggcgaccggcgactcgtcgacgagcttgaagaagtcgccgagcgcaagcttggaacgcagcgtcaagagcgtgttgtacactgtcgcaatgcgggagtttgagcctcgtcagcggtgtgtactcgcagcacatgcagaggcgaaacgtgcccaggtcggtgtcgccgctcttgacggccttctcgagcgcctgccggtcttcccgcatgctcagcaagagctcgacgccctgctccattcggctctcgagctcgagcagctgcagaaagcaagagttggagtagtgatgtcagtgtcatgcgtctcgtctgccgggtgcgttcggggcccgctcacgttgagggcaaggcctcgccggccggccttccaggcttcccgtgcgacactctcgtaaacgccgcctttgcccttgccgagcttgcccctgatacgtcggaccagggcagcgtctgcttcgccgcccgccccagcgccgaccgtatcggacgagacgagcgtcttggcccagtgctcgagcacgggggctgatggcaggtccaggaaggcggcgagacggagggcgaggagatggagcgagcgcgaggtcaggagagagagtaacagatgcttgtcgacactctcgtatctgcacgaacaacggtgggatccgccaatcagcaggcgcccggcgagggagcaggagcgactagcgtgaaggaaacccactgctgccagctcagcggaatgccgaccgtccagtcgctcagcgcgttgaggacccgaaggcccttgccggcatcgacaacgccctcgtcgccctcgcgctcatgctcctcaagaaagccgcggccccaagcgacggcggcaaggagctgcttctggatcgctggagtcccagcctgctggagaccgttctcgtccgagggcaacgtcaagtccttggcaatggcgacaagagtcttgacgccatctttgagcgtctcgtcgtcgccttgcgagccggccgaacggagctgagtgatgagggcgtacgaccttggattgcccttgagaaagtgggcgtgggcctgaaggagacgggctgccgccggttctggatcggtcgccagcacgagctgctgcaggtcgtacggcaccgtcgccaggaagcgatgatgcgagggcgagagaagcgacatgccggccggagtaggcaggaggaggggcggctcgcttgtcggcgacggatagtcgacaaagccgccagccggcccgcaaacgacaacctttgacgccttgcgaccgcctggtccgttccaggaccacgagcagacgaccgagtcgttggcgcaccactgagcgtcctcgagctttcgctgctcttcgcgctgattgggcggccgcgcgtcgagtcctaagagggtgaggggcggcagggtcgagtgtgactgggcaaatgtcgacgagacgacccagagcgaagggaaggcgttggctgaagagtttgagcccggggacgtcggcggcagtagcagcgctagcagtcgacccgacggcgatggcaggagcttcaggaacgggcccttgtcgatcctctgccaggcggaagaatgttacgagtcagccaggtcgatgacaacggacaacgacgcgggtaagtctgcgcagcgcacgcacctgatcgaccgattcgtcgcgatcgagcgtgtgaaccgtcttgcctcggctgaggtagacggtcgcgactccgagcggcgcctcgtcgggcccgatcacgcaccaggcctcctctcgcctgctggccgaggctgggctacctgacgatgccgccgcggccccgttggccggtgctgacggcggcagggcgagcggcgtcggccggccgccctcggtcgggacgtcccagaatgcgcccgagttgagccttgcgacaaagccccctgggtagggctttgcgtcaacgatagacagaccttcggccggctgggctggctgctggggctgctgcaggacggcgttggcaatcgagtgcgacgagaaggtggccgagttggtcgcgtagatccggtagcggccgccctcttcgagcacgacgagccggccccgggggtcaaaggcgaccaggactggatgcgcccagttggccgggcgctggctgagcgagacgctcgaggaccctccctcgacgtcgctcgtgtcgtcgagagcaaagcggacgatcggcaggcccgagctcgagtagatgccgacgcccttgtgcagggcggccgacgacttgggcccagagtacggcacgggcaccgacgagttgcggaggagcgcgatcgagcctgagacgggcgaatgcgcgacatagaagggccccagtgaggatgggaaagggatggcgcccgagctggccgacaaggtcgacgaggctgcagcggcggccgtcgccgaggccgagactgaggatccgagcgtgtagagcagcgaggacgtgtagaaggtcgtctccagcgggtcccacgatgatgcctgtgcgatgagggcgtccatctgcacgaacaaagacagaagacaggggagtgacgacggtctgtcgatgagagatggtcggcagggctcgtcttcagtcggttcggaggcagctcagccgctccgctgctgcgggcgaatagaggcggcccagctttcctttgacgctgctctcagctcgctctatcgagtacggccgggaccgaggaagagcgctagctcggctgcacccgctcccttcctgtctcgctgtccacaaggagttggtaagaaggccctgaggaagctctcggcccaagaggagccgagccgtgcctgctgctggcgcgcgaccgcccgccggactttgcctgctgagctcgaccagccctccgacgctcaccctcttccctcacaccctcccttctcgcatccgccgctcatggcgtccttcccgcggccgctcatgggcctcgcctcggcgcttgtcgcctcgtcgtcgacctccggcctcttgcaccggacgctggcctcgacctcggcctttggcgcgcggtccttcgcgtcgtcgtcggcccgggctcgctcgtacaaggaggtccaggaaggcatcgccgaaaccgaggcgagggcaaaggcagacgtcgcaagggttgggaaggagtcggacaagaacgagctggcctaccggacgaacccgcaggccaaggcccagatcgacagcacgccgatcgacatgctcggtgggtgtggtcggctgccggccgctccgtcaagagctgaccctgccgcctgctttccgacctcgctcacgccttagcctacattaactttccttcttatactgaggcgaggaaggagcctggcttcaagaccatgacttatctccggatgttgctcggcgccaagaatgttatgctcgagacgtgcgtccagtgccggcggacggtaccgaacgaccgcccctcgagcgccggtaactgacactcagtctcgtcgctctccccctctcctcttttctgctccaactcgttgctctttccccatgcgctcctgcaacctgatgctttcgccaacgactgaccgcgcctacacacttcaggcggagctacgagctcggctttccaatgaagacaacgagccgcttcctgggccagtatgcgggctactttgccgagctcaaagcctttattggtctcggcggcccaatcccgcagaaggagcgcgagctcgtcgactcgctcgccaggacgtacgtcagcttccgcgaggccgagctgcgcggcaatgcacaggatatcgctggggtgaccgaggcgccgatgcgagcaaaggtgctgcgagacatcaagatcaagcctcgaagcgcgcgcgtcgcccggggcaagtgggagattgtccagcacatcgagaagccgaagttccagtcgctctttcgtctgccaatcatgaacaagcggacgctcagccactgcctcatccgcttcaacacggtccaggtgcgccgccttggtttcttgtctatgggctgccgctgactcctgcaccgttcccgcgcagcaaatcacgctgccgcccaaggcatccgacccggccggggagcctctcgtcaagcagacgacgatcgtcgagaacgtgctcttcgagcggcgcgactggctctgcggtgcttccaatacgacacagatgcccggcagctcgctgaaggcgccctggaaggtcaaggcgattgtcggctacgatgacgtcgacgacatgatgagccccgagccggtgaagaaggcgacaaggagcgagatggagggtttcggctcgccctagcaattgcttatagagacactccctctgtgatggacggcctcttaactgcaaactcgggtttagggcagccattgtggccggagggcaaagagtggcagcgcaggccgagatgctgtgaagcccggaaggatagctcgtgcgacgatcgggaaaaggaaaatactgattagcggtgaggctcgagcagagcccgatcggatcggagagacgaatatatcgcggcaagagaggagagagagagaggggacagcagtagcagggtcggaggaagggcgagcgtttcgaaaagaccgatccgcacaaggttggcgacggcggtgcttatactgcctgctcgcgacgcttgtcgagcgggatgccgtcttcggtcgagggtcgggctatgcccttcggcgcacaccagaccggatggaagacgttgagcgtcaagagggaggcgagctagagagaggcaaggcgtcgtcagcagtcagacgcggcaggaacggcgcggcaggcgagggattgacaatcatggcgccgtcgaggatgtcaaagagcgtctgattttcaatgatcggtccggtccagcccgcaaggagctccgggcaacggtagattgaccggacaaagacaaagagggtcgaaatcgacaggccgaggagcatcagcttgccatggtgccgcgagaggtagtcgtcgaccggaatcgcttcgaccgttgtgtgctgcgacgagctcgacgagcgatgcgctttgcggcgagagagccaagcgaaggggtagagctgcgtcgtcgtcggccggttcttgaggaagcggtaggcgaactcgatgagcagccagctgtagcaggtcatgatgcccatctggaagatgaccccggcggcctgtgagagaccggtggagaggaaccggagagagtaagcagatggcgggagtggaacagttgtaccgtgggaagggcgcaccatgatgctggattgacgaccgagaagagcgttacgtgtcagcgagctggaatggccgcagggacgagtgactaagaggcgtctcgtactagccgccggtgttggcgttctcgaacgtcgtggccgaggcggccatgccaccgccgacagcttggatgatgagcgaaagcaagtctcccgacaggaagatcttaacgtacgtcgccggggcgagccggcagaacccttgaccaaagctgcggatgaggacaccgaggagcacgtagttccctgccatctggaccgctgggccgaggatcaaagtgacgattctgccaaagagaccatgaactcgagattagtcgtcgagtggaacgaaacacaatcagggacacgagctcactggctgagaaaggcatcgctacttgaggtccaaaggccgccgtagtttgggatccactcgaccgccaaggccgaggctaggcgcgcgccccagccgcccgcctcgaggccggtcgcgaggacaaaggtgtaaaagaggaaccagcgccgcgaggaggcggcctggaggacgtgcaggacgaagctcaggccaaaagcggccgtaaagaagatggcggtccactcgcggacgttatagccgtaggccgtgtgctcgaccttgcctgtgatgactgcgaggagcagaaggggtgcgcgggagcgagaacggcgtcatggcgagagggaatggccggcagggtcagcagaggcagcgacggcgaagcggttggcgacgggcgcagtacgcacgattggccgaaccgacgacgttgctgccgaggagcggtcgatgatcagctcagaaaacggagctcgcggtcagcaacagagcctcacttgacgacgctgacggccgaaggcgggaagccgtaagtggaggaggacatggcgcgcggccggtacgtcgcggtcggaaggaagacgcgcgcgggggagctcgacggaggggaagaaaaaggggctgcttgctgctgctgctgctgctgacgttggcttgaggcaagcgggtgatctgtttgttgtgggaggagactggaatgaacggggacaggcgaggggatgatccattgaccagcgtgacgagaggagaggccgaagtcttgtacttggggcgggacggcgaagtcgacttctgaaggccgagcgcgccggtcgatcgccggcgcgccggcctcgaagtgcgggcaacgatggccgctgcgacggccgcctcgccgacgcgaagcgatcgcgctcaagcgagagtagtttcctctcgtcatggtaaacgcagcagctgccgatcaacgggcagcggcctgcgccaggccggccgccgaccggatccgacatgtggtgcggccacagcggcaggggctcaacgccaggcgtcgacagcgacctcgctcgctcgtgccgtcgccggtctaccaggtcgccacgtctgagggagtacatcagtctggcatcataaaacccctgccaacttagaggtagccgccgccgccctcgtcgtcgtcggtcaggtcgtcgtcctcgcccgactggacaaagcccggcctacactcccatgtcgttccgtccgtgtacggcagaatccggagcggcagagcgagcgtccaatacgagctgcgagagagagagaaaagaccactcagcgccgggccattgcggtcgaaacctcagaagccactcactagccctcggtgccgacgttgaaaaagagctcgaggttgcgccgccagccgaggtcccagcggttctgccactctcggccgtcctgcttggcccgagtcgtatagtaggcattgtcgtgaccctcaaccgacgtctcgccccagcaaatctgaaggacgtgccagctggccatgacgccgacggcgatgccgagcgcgatggcgaggacgaaagtcaaggtgaaggcgatccggggcgtgtagtacggccactgtcgggcaaaaggtagtcagcagggtggagggccgcgtgaggagcgcagtgattgacgcacgtcggcattcgagttgacggaagggatgaagtgctgccaggataaggagcagaaaagggcgcaggcgagcacgaggtaggccctgaaatcccgtcgagagcgtcagctgccatcaaagccaatgagctcgacctttgacgcacatgaagaggacaaagtgccgctcgttgcgaagaccgacgcagccgtttatccctgagagcgcgtccggagagggacagggcgccatcagcgaaacgattaaagcgagtcgcacgttggcattcatacgcacaggggcagtggtggtcaaacttgagaacgcactgcttgcagacagagcagtggtgggtgcgctggaggacgagagattgatgtcaggaggccggccccgcaaatggtcgctcgctgcggatgagcgcacttctggcttcgacccgccgcacttgcgacacttcttgaccttggccgactttgcttggaccggcagggccggcacgctcgactgctcagtttgaccatcccacctgctgagagcgtctgccgcctgctcgggccggcgcggcgtcgcccaccaccactcgccctcgcgcgggcgccccttgccgtcgccgtcgacgggcgagcccggcttgacagagcagacgagccagtagtggccaaagaggttgaccgcgacgccgaacaagacaatcgccagcggatagtagatcaagcccggtattgaaggtcgcagggatgggtagacgagctcgactgcgaggacagggagagtagcgaagcgtcagtcagacgatgctggcgagagagtctcgtgagcggtcgactcagactcacagaagatgagagctccggagcccatcagaaaccaggcgagtcccacaaagactggcccggccgcacccgtcagccagtcggcgcatctgcgtcaacgcagagtcttgcaggagaccgtcagcgccggtgttgaggccgagcttcggcaggccctggtgcggcagcccgcgattgagacgcaccgctcaaactttttgaagcatcggaagacaagcggagcgcaatacgcgcaggctctcggcatgcgaggtttgacgaggcagtgtggaggtgaatcaaaaggaagaggggagccggtccggctcgaagatggtcgtcggcggctgaggcgcgagagggacgagtgaccgacctggccttcgcttcgaccggacgctgctgtctgttgtcaagctcgacctcgcacacgactgcaagagacatgaaagcaaccggactgctcatgttcgctctggcggggcccgaccaatcgcaagagtggggagggctgcataggattactgcggacggaggcaacgacgtcgcaccggccgggggggttggattacaaggaactcaagactcggaggtttgaaaacgggcgggcgagtaacgcttgacggagcctgtcccaagaaggagggatagacgcagacgagggtccctctccaaggacgcgacagagagatcgaagagagggggcaaaggaggggcagacgcgcgagcgtccgacggccagagtttgtcgaagcgagaagcgggcagggggccagagagacaggagagaaataagtctagtcggactcgtcctcgtcgtccgaggcctcctcagcgggggcggccttggccttgcggcccttgggcgcaggcgggtgcgatttctcgtactcggccttctcgccctcgtagcgctccttgtccctggaggtgcagatggagtgacagaaagcgttagccggcgaaagacgaaaggcaagtcaatgtgatgcgagacgcacttgacagcagcctggttgtagggctgcagaaagggaggaagggagaaggtcagtcgactggggtgtatgcgcgacagagcagcgagaggccgacgcacctccttgtcggcgtcagacagctccttccacttctggccgaggagcttgccgatcgtgccgaacgagacgtccgggttctcagccttgactgtctcgcgcatcgcctgcgagaatagcatgtacgacgagaggccgctgtaacgagagggaaagaaggattgtcagcaacatgcttgtgagagcgacaaatagatgcgcggcgacggaccgcttgggcgcgtccttgtccttcttgacgcggggcttggcgacctctgaaaggcgaaacaagaagataaggccgtcagcaggcctttctgcgacgaggcatgatgacagcaacgagatgaggattgactcttggtgtccttaggcatctgcaaaggtggaaggcgagagggagggacggcggtcagcgctttgtgggtgggacgcgtcggggcgggcggaggccgggcagagtcgaagacgcgaccgagttcgccgccgcctctcctcgaaatctccgcgtgagatgcgaatcctcagatgggctctcatcatgcgatgagcccggtcgcgacgagtcgttcgcttgacgatggatgcgatgatcgggcagcgccaaccgaggccaaggcgtcgttggcctgacgcgtcggcacctcagccccctcagagaagggccaaagagcccagggtcccgggactgacagcgatcagccaacccatccggaagacggcccttcgacccatccacgcccagaagcgtgagcgatgggtgcgaggcaggcagccaggggtggatgggttaacgccgggtgcagtcaggtagcgacgcgacgcgtccgggacgcgtgatggccagggcgtgtgaagatggggcccctttcccaccccacgtgaggcaggccaacatccactcccttctcgagacggacgagcgcgtcgcccaagtgctcgaggcgatcgacggcgtcatcgaccagctcgacacgatcgacgccaagatcgcaacgtacaagatccagctcggcgtgcgtcccttcctctcctccctctgctgtcagtcgggcggaagctgacgtgcccctcccccttgatcggaccgcggcggtgttaggccgtgtcggacgacatctcgtacattgagtcgcagaaccgcggcctccaagttcagacgtcgaaccagaaggcccttctggctgagctcgaaaatctcctcgtccgtccctctccccctccctaactttcgctcctctaccaaaccgacgatcctgccctctgacgccgctcgcgccgctcgcagacggtcgttcaagtcgacaacgccgacctcatgacgctgacgcaggagtcgccggggtccgacaagggcattggcgcgctcgaacgggccgcggcgagcctctacaaggcgcttcaggcgatcagagagacaggtctgtccgctctcctctgctctgccttcgctctcgcccgctcgcttgcacggcctgacgtcccttgtcgattgtgtgtagctgttggcgatatgcaagcggcgatggagcgctcaggcgagtacgagtcgtacaacgctcaattctgcaagcgcctctcggactacatggcgatcctgttcaagttccaggtgcgtccctgccccatcctcccgtccctcccctcagccgtcctcagctgaccggcttgcgcttttcgatggagcgcgcgtatgataggcggaccagctgctgagcgcttcgacgccggtcggcggcataccgacgatgcagagccacgacaagctcgagggcagtctgacaaagtactctggcgtgcgtcccacgtcgcgcgttgggcgctgtcgctcgctcactcgctcggaggggtcactgacacctcgtgcccttctgcgatcgacagctcgtgctctacatgaaggagatggacgagccgcgctaccagaagctcgctgcagtgcgtcctcccaagccctctgctcacttatccatcgctcgctgactagcttccccccgctgtcagacgtacttcggcatcgcgagcgagcttcagcggaaggagatcaaggcgctcctggtcgcttacattgcgcgcttgaaaaagtcgagcgaggaggacgcggccgaacgtacgtcgtttcgtccccccttcttcggcaacgttacctctgacctttgacattgcaccgcagtgttcatctcgggcggcgccgggccgagcctgacacccgcgccaaagggcgcggtcgcgatcgcccggtcgaagacggtgtcggcgttcaagaacccgctcgacggcggcggcggcaagaaggacaagcggtccgactcagagatgcgcatcagcgaggtgcggcgcgccgagccggccatctcctttcccttggcgtcccgctgaccttctctctggcttctcccgagtaggccttcgaacgcgcctttacgcccgtcgttaccgccatctaccgcgaagaagccctcattgccaacttcctccacatcaacaaccaggacggctcgacctttgccgactacatgggcctcgagccctacgtccggcgccaggcgggccggcttgcggcccgcggcgtcagccagccggtccagcagctcatgcggtcctcgatggacctcatctttggcttcctcgcgcccgagctcaaggcgtggatcgatggcgccctccagcgtgacatcatgtgggtcgtcagagccccccgcgcctagctcgtcattcaggctcgctgacggtactcccttttccctggccagacaaatcgtcggcgtcatggccgccgcagagcgcttcctcgccgacgccgagcaacggaacgaggcgtttgtcgtcaacctcttccagaagcagctccagcggttgaatgctcagctcgagcagtttatcgtacgtcacgctgggtcccggtggcgattcgagatcgtcaaaaagagaacgctgattcgttgcctccatgcaggccaaggtgatccgggcgatcgagagcaccaagctgacggtcaagaagcgcaagggcgttgcgccgttcgtcaagcacttcccagtgtgtcggcctcctgtctgttgcccgaagccgcgctgcccttgctgagtcctctgccccgcccactaggtcttcatcgactcgttcgagacccagctcgtcggaaccgatggcctccagatccgcaagatcgttgacggcgcgtacgagcgcgtcgccaatgccatctttgactcgctccagcagatggcaaagatggacggcgccgacggcgtcgcggtcgaggacaaaggccagctaaactaccacgtcatcctgatcggtcagtcgtcggctccctctgttgcgcccgacctcaagcactgacccttattctgcgcattcgtcagaaaacatgcattacctcgtcggcgagctcgcgagccagaacccggcaacgttcagcggcctcagcttccgtgcccagggcatctaccgcgataacttgacgtcatacatgcgactcgtcctgcgcaagcccctggcgcggttgatggtccgttccagtcgtggagcggtacagcgtgacggtcccaagagactgacgggcccctctcctctcgttcgcaggagttcttcgaaggaatcgagcgtgttctgcactctggcgcagcctcgccggccgagataccaaatctggccggctcgtcaaaggctgcgctcaagcgggtcatcaaggagcacgacgcaaaggacctccgcaaggcgtctgtccctgcagccactctacgttcaggagacgctcgctgatgtcgcgcttccttcttcttgtcccgcagcattgagggcatctacaagaggatcgacaagcacgtgagtcgctcccttcttggcctcaacccgtcgcatcggctgacctctatgctctcagttcgacctgacgagcgctggcgaaggcccgtcctcgatgagcgccagcggtggcgcgagctcatcaagcgcgctgatcgaggtcgtcgctgacgaggtccaaggcgagctctcgggtttgaccgaaaagtggtcgtcgctgatcgcgcgctgctatcccgacgctgggcttgcgctcgactttacgacgaggtgcgttgcatgtcctcaggttggggtgaaggcgaggtggctaacgaacgccccccatctcgacagcgacgtcgccggtgcgttcaagcgcgccaaggctggcctttgattcaggccacccccctttgtcttgtcgctcgcgcctgcgtttgaacgttcatctggttgtacactgtcatgagggtgtggcgtttgatggaccggaagaggaggttcgggaggggagaggtcgtcggtttgacctggaaaggaggccgactaggttaaggggagggaaaaggggaggggtgcaagaaagactctgctcgcccgtctgatccggaactcgcaacaaagcgctccagcgatcggaggggtagaggagaggggggcaggaagggagagcttgggggagcgtcctgggagcgagcggctcacgctttagttgtcgtcgtcgccctcgcccgtctcggcgccctcgacccggcgcgtcttctcgctctcgagctggttgtagagcaggaagagggccttctcgctagaagcgcgatggaaggggggaaactcgtcagcgacaaggcactcactcgtctggcagagcgcttcgacgagagaacccactttgactcggccgtgccgacgatcgtaaacatgcgctcgcccgtctcgtcgtgcgggaccttggcaatcgagatctttgagcccgacagccggcgaatttcggtgatcttgctgccggcccggccaatgatgcagccgaccatgtcggacgggatcgagatgttttgcgtccggagcgacgactcgggggccgaggccgtcgccgactgggccgcgctcggagcctgcttgggagcttggttctgctgctgctgctgctgctgctgctgggggatctggccgagctgctgctgctgctgctgaggctgctgctggaacgagccgagcgcgccggccgctgccgaagcccgccgcggcgcaccaaaggcacccatcggcccgccctgggggagaccgaagccagcgctcgcccggcgagcagcaccgacgacgaggccaggaacggccgctccgcctccggcgaggacgcccgtgtcgccgccggcgcccgggtgatagaggacggtgccctggccgcgctcatagtcctcgagcaggcagcggccgatctcgagaatggcgaccttgacggcctcggtcgtgccctggacttcgacgacgcgctcggtcgactggggcagcatgtccttcgaggcgaccatgcgcgcgccagagacgtcctggatctgcttgatcttaaggccctgtcggccaatgatcgtgcccatcaggttgtgcgagatgagcagccggaccgaggtgaaagcgttcggcggcggcgaggccggcgtcgtcggcgtcagaggcgtctcgagcagctgccgagcgatctcagagtaggcctgcgaggagccggagaaggaacggcgtgttcagcggttgattccgattacgattttcgcccgatgaatgtgacacgcacgtaggcaacgttctcgacaccgcccgacacgctgaggacgcggtcgttgacgccggggacaaccttgctgacgccagctttgacgccagttaggtcacggaggtcggcgacgttcttgccagccttgcctgcaagcgggcgggggtcgtcacaacgcaggtcagctcagaggctcgcgccgtctgcatgtgctcagaagaacggaccgatgatgacgccggcctccttggtcgagacgagcgcgcggagggtgagctggtcgggctcgccctcggtcggctcgtggtgcgagccgtcctcgacgggcgaggcgggagcgttgacgggcgaggaggcgccgtcgacagcagcggccgagtcggagactgccagcaggagcagggagcagcaaggagatggcgacgtcagtcaagtggatggttcggcgagatcaagcgagtcgtctgggccctcagcctcggtccgccttccctcgtcgccgactgttgacgagagagcccaagcgcgagagcttggccagcggcagacggaccttgggcggacatcgctttttgaagggagaaggggagaaggggagaggagggagagagcggaagaggatgaggaggagggaggaggaggggaggggtcgtgaaggggagagggagaggccgagcgagcgagatctgtccaagagcggcggccgtctgcgcgcgtttcccccgcgcgcactgaaatctggcgcccagccgggcccgttacgctcgtagcctcacgcgggcacggtcgacaagtcacgtgagtcccggacgaggggtgcactcatcaagaggcaaacaggcattgtggcatagggggcagagggaccagtacagcaaacggtctacaagaggggaggacgagagaaaggggcctccgctaggcgtcgccggcattggcccggacaatctcctcctcagtgatgctcgacttcaagcacatctgtcgaggaggtatggggtcagacgacgctttgtacggtgtagagcgatcgcgcacgcacttgatggaagattgacgccggattgcggaagaggttgactggcgtgtcaaactctgcgacccggccagcgtccatgacgaggatcctgtcgtaaaagatgatggtcctggtcgacaaggaggttaggcggcgtgcgcggcagagtgggggcaaagacacctggcagggctaagcagcctcgactcaccggagacggtgagcgatgcagaggagcgtcttgccggcgagctcggtccgaatcgtcctttgacgcggagcatgaggcgtcagtcagaacgaaaggtcgagagaaccctgacgacgagggacgcactgctgaatcttggcgtccgtctccaaatcaaccgccgccgttgcctcgtccagtacaacgacccttgcatcctccctgacgagcgccctcgcgagtgagacgagcgaccgctcgccgactgagaggttgctgccctcctcgtcgatcgtcttctcgaggtcccacttttcttcgggcgcacctgcctcgcccgcttcggcgccgacgaggtgcgctcggcggagcgcatcccagagcttgacgtcctctgcagttggaccatccggggtcagcaagtcggttgaaggccacgcaaggcgagtagagcagacgcaccgatctcgccgaacggatcgagattggaccgcagcgtgccagagaagagcagcgggtcctgcgggatcatgacgatcgaccgcctcaggtcgcggaggccgagcgtcgaaatgtcgacgccgtcaatcgagatggatccagaggtcagtctgcgaaagggtgcagagtcagcgattatccatcccaagagaggcgcatgaaactgaagaaggacgaactcgacgagacggaagagagccgacatgattgtgctcttgcccgcgctgcaagtggatggctctttcgtcagttgtctgtctcgccgttcaacgagcgccctccgacccaccctgtccgtccgacgacgccaatcttcgtcccaccttcgacctcgagcgagatgcccttcaggacgggtggcaggcccggccggtagctcatcagcgccttgtcgaaactgatagaccctcgctgaggccattcggccgggggcttggtgtctgcccgctcgtaggccgcttctgcgaaggggatgggaggcgaggagcggcaggtcagccaaaggcggtcgttaagtcgcgactgaataaaggggcgcgccttgcgggacgccgtcaccgtagctgtagtgcgcgatacgctcggcgctgttcatgttgttctcgactgtagcaagaagagagggctatcgtcagttgcaggcctcggagaaaagtaagtcgagccatcagcgcaccttcggccgactgcctcgtcagcatgctgcgtgagagacgaccgtctgtcagctcatcccagcagacgtcgctcctttaaggcggcctacaaacccgagcatctggacgagcgagacagtgtaggtgaggagcaggccgacctgggctggcgagttggctggcccgaccgcgacgagcagggcgacgacgaggatgaggatggcaccgatcatgtcgagtcgcactgctagccatctggaaatgcgaggaatgcatcagcgaggtgagtcgcgacagagaggcaggcaaagattccgcaccgctgggtcgtcacgtagacgaggtaggctcggttctctgcgttttggggtcagtcactcatcggccaaagccgcgagtcagggtagcgcacgaaccaaggtccatccggtcctgcgcaacgcagaggaagtcgagggtcagcagcagcagtcatttaagccagggtggttcacgcacagcattctcctggataaagcggccgctgacgccgtaggcctgtgcaaagaagttgtgggtcagcgccagtacaccgagcaagcctcctcgagcacagactcacgcggatcgtcgcgagacccgagagcgactcgctaaagtggctgtagaggccggaccggaattggctgtcgagccgcttgagctctctgccagacgcctggtagtagcgctgcgaggcccggtagcagatgatggccgtgaccgcggcgaggatgaagtagggctggaagatggtgatgatgatgatagagccggtgatcgtgctgatggtcatgacgacattgcggagcgactcgggcagggtgttgtcgacgctgcagtgaagggctgcgagtcagcggggtgcgaagaactcgacgcaaggcagcagcagcacagcctgcacgcacgtgtcaaagtccttgcctgcgaacggcggggagggggtcgttcagctggctgtcggtcgcaagtaaggctggcgtgacgcaccaaagatgcccatgatccggcccagaggcgtcgtgtcgaagaaggacgacggcgcgtaaaagacggtctggaccgcgcccttgtgcaggttgcgcgaggcaaagaaggaaaagtacgagagggtaaggccgaggaggagtgtgaagccggcctgcaggagaccaaggacggcgtagaggccctggtagaagccgatcggctgcttccagtgatccgtcgtccaccagacgagccaataggcgccgacactctgcgcgccctgcatcaagacggcgaggagaaagattgttgggagtaggatccagccgtgcccggccttagtgtagttcgtgtagattgacttttggatcttaccggtgacgcggacctcgtccttgatcagcacgccctgaaggagggaagcaggtggaggagacgtcagtttatgacgaggcgaaagccatggaccgcgaccgacgcacgtcagcgtcctcctcgccctcggctttctgacggccgtcggtcgtcggcgccttggccgagacgccgcgcctgaggacgggttgcgaggccgtcgggccgctcgtctcaattgccgcctcctcctcaatgtcctcctcctcgtcctcctcctcctcgacgccaccaaagtcgtgcataaggcgcgcaaaggccccgtttcggtggagaagctcgtcgtacgtgccggcctcaacgatatggccatcctcgagcgtgtagacctggtcgacttgcggaagaaagtggagggcgtgggtgacaaggatgaccgtcttgccgagctccttgagcttgaggaaggcacactcaaagacgcgtgcgccgacgtgcgcgtcgagcgccgaaagcgggtcatcaaaggcgagcacgtcggcgtcaaagtagagggcgcgcgcgatgttgacccgctggcgctggccgcctggcatgggtgaagcagacggccgtcagcacgaagcgtctcgggaaggttgcgccatctgacgtaccactcaggttaatgccacgctcgccaatctcggtcgagtcgccggccgggagcatctcgaggtcgctgatgaggcagctccgctcgacgacctcccagtagcgcttagagtcaaagggcttgccgaacaaaatgttgtcgcggacggtggctgcagcggtgcgatggagggtcgacggtcagcggtcggaactggcgctcgtattggagcaaaggagggctctcgtaccgttctggatccaggccgactgcgggcaataggcgactggccccgagaatgtcaccgagccggctgtctttctcatctcgccgatcagaccttgaagcaggctcgacttgccgctgccgacgggaccgacaatagcgatgaggctgccgtgagggacgctcaggttaaggcccttgatgcggaacgccggggctgacaggtgggcgtcgcggtcggcctcaagcgactgtttgggcgtccccttccgcgagaccgccttcttggacttcccctccttgccgttagacggcggcggtgcggcggtgacccactcgaagtcagcctcaacgacctcgacagcagaggcctgcttcgcgtcgaccgtaaggctcgtgtccatcgcctcggcgagaaagagctcggtcagccggttggaggcgttccaagcgtcggtcgccgccgagaaggccgttggtagtagcatgagcggctggcgcatcaactgcagagaggaggtggaactcagcggtagtcaggcgtgaaggcgcaagctgcgaaggagggggcttcacctggaagagcgagaaagcggtaaagatcttggccggattcagctcgttgccgacgccgacgtaacagacaaaggcgacgacggccgagaggaccggaagcgagaaggcgaccgccgtgttggtcgcgcggatgatgaggagcgtgcggattccgcgaagctcatccctgcggggcgacacgaacggcgatcagcagggcaacttcgcaagacgagtctgagcagcgacgcaccgtcggagcttgtcaatcgagcgactgtaggcaacctcgaagcagaagtacttgatgacgcgcatcgcgccgaggagctcctgcaggagcttgctccggcggtcggtgtactgcatgctgtcgagccggacgcggatcgaggccttcatcgcccaagtctgagaggatgagaggcgagatcgaggtcagtcgaagcgattgaggaaggggttgaggcgatgaggcctcacttgaatcgggatgatgagcaggaagaaggcgatgcccgcgagggcgctcggcccaatctgccagagcagcaggccggtggccaggaggatctgcggcctggatgacgaagcggaagtatgtcagaagaggatgtgactgaggcggagcaggcgtcggcgacgtacatggaggcggggatggaggggaaccactgtggcagtgcaacgagcgcaagtcagtctctctctcaagggatagagggccacaaaagacggtagactggaccatggccgcatattcgatcctcgcaatatcactgacgatccggcggtcagaaggtgtcagcgatggattcgggagagaatcgagaccgagagggaggacgcacgtcgacaggtggttcatgagccggccgttgctgtactgcgcgcgactctggtttgagaggacgagcgcgcgcttgtagacgctgtgaggaagtgaagagaagggtgatcagcctcggtaggtgggtggaacctcggatcgcggagcggtcgcacctgcaagtgagagctgcgcgaaacaggacgccggccgtcatgccgcgccaccagactgtcgcgagagccgagtagtcgagctcgtcagtctgtgccgctttagggttgattcgaaagacaggcacggcaaaccttgatgagtgagagcagaccagaccacgctgaggagccacatgccgatcgccatgccgacgcccttgccgcgactcggcagcggctcgccgttctggcgggcccggacggtgtcctgcgcaaagtagatgatgtatctgaggaagtggagcgcgacaggtgtcaggtcgagactgacgcagggtgagggctgacgcgactcaccgggcgactgcgccgcgtgtgtcaaagggagagcagtcgagtcagtggcgaaccgaaacgaacgcttaagagagcacgcacggattggagaaaacatctggcaggtgtcgccgccaatcttgaaggcgattgaagagtagtagaagagtcgaaactgctcgacgatggcaaagatgagctgcggtcgccgcttgccgccccctgagcgccacgcgcgttccttgtctgaccgcgagcccggcgtcgcgagccagcgtaggcgaagcgagaggggcacggcgagctcgcctgattcgagccgggcgttgtgcgtctcgcagtcggcgacgcgccgggcccacgaggcgtcgaggttggtcgagaggagagcggcctcccgcgaggctatcgggcggcgcgtagaggttggtcagcctacgactctctgttgcagcaagacgtccgtagcggtcacgcacagtcaatcttccagaggtcctcggcgtagagcggacgctggtagccgagcgtcatgatgggccgacaccaacctggggcgagcgcgccaggagatagccgagggcgtcagcgctgctccaacctccgagagtgagtccgctcgcgacggacgcactgtaggtgatgtaggcccagagcgagcagccggccaagggaagaatgccgatcgactcgtcgtgtatcgagctcggcggcggggggggagccgtctttggccgccagacctggtacctgggaggtggtggcgcacgagcaaggagaacgtcagcgtcgcctcacccgccggaaggcaagtcactcttggagccgcaccagtgtttccggacggcgaccttcatctcacgctcgtcgacggccgccttgggcgcggcattgtcgtcctgcgctctatctcgccctgccgagcccttttcgtcgcccttctcggtcgacgccgacgggggctcagcgtcgtcgacgacgacggtcgcgctgctcgtcggccgtgagctcggggccgcttgcttctcgaccatcgggtcctgaccggcagaagagataggttctgccatactgcgtagcgaggaaagggatgggaaggaaggggagtcgttggtcggagggagggagggcgagacgaaggaagggggtccttgtgctctcggctcgatcgaccgcgagaggcgacggccagcgccgaaagggtgtggaggcgtcaatctgccggtcccgacgggtcgcctgttggtcgggcgaggccaaaaaggtcggcttgaatcgtctccgtgctcgctgtacgacccgacgatccgtcaccgccaaggagaagagagaggagcttcaaatcgaggagggacgacgaccgctctcgtcgaccggctccgagcgacgacgacaaggaccttctttattttccttcgaccctcggcgcagcctgctgctggctcagcccaaaccggacgctctctctcgccaccgacctcctcctctcgacaagacgagagcctcatcccgcaacgacgacagcccatcctctcacctgcagccacctgcgctcggcagtctctgcaatgcccgccgcccgccggtccgcccgcctcctggcgacgccatccggcccgacgtcttcgtcagccaacagccagctcctcacgcctgactctgcacctccttccgtcccttcggccgccatccacctccccggagcctcgccttcgggccggctcaccttcagagccaccctgagaaaggctgctccaccgaccagaaagccaaaggtcgccctcccgccgacaccaaagtcgccggcgtcgttctcggccaagccggaagcatcactggtggcggcggcggcagcctctacccaagcccagccagtcgcgtccagcagcacgagcacgatgattccacccgtcctgccgttctcactcgacgccgcccgagctcacctgatcgcggccgaaccgcgcttcagcccggtcctcgccactcaccggctggcgccgtacgaggacttgtcggagccggttgacatctggcggtccgtcctgcctatgtgccgttgcctttgctgggtgagctgacatccctcttcgcacgacgcagctcgctcgtgacatcgctcctcggccagcagatcagctggctcgccgctcggtccatcaagcaccgcttcatcaagctgtttttccctgtcctgcccgagaagcacgacccagcgacagcggcagcgtacgagcacctctttccgacgcccgagcaggtgctcgcgctgcctggcgaccggatcctcgcgctcaaggcggtcggtttcagcacgcgcaaggctgagtacatcctcggcatcgccgagcgctttgccgacggcaccctgaacgccgccaggctctcgacagcgaccgacgccgaggtccgtgaggtgctgatcgccatccgcgggattgggccatggacggtcgacatgttccagatgttcaacctccaccggccagacatcctcccctgcggcgacctcggcgtccagcgcggcctgctcaaatgggtcctgctgtcgttcgaccccaagacgccacacacgctcgtcgtcccgcctgcgccaacgacgccacatagcctgcactcacacgcggcgaccgcgcccaactacccgcccgccttcatccagcccgcaccttcgtcaccgtcgacgacgaccgcacatttcccggcgtcgcaccccgccctcccgaccccagcgccctcgacgtcctcttctccggctgcagctctcgctctgcccgtctacgcgccgcgcccgctgcccgagggcctcacgctcgacctcctcaagtcgcggctcgctggtaagaaggccaaaggcggggcgtatctcacgccggccgagatggaggttctgacagagagctggcggccctaccgctccatcggcgtctacctcatgtggaaggtcgacggcgaggtgtgaccgctcgtccttgtcggcctcgctcgcttcctgtcacggcagctcccatcgcttgtctctgctctcgccttcctcttgttgttctccctttgaagatttcgtctctccgctgttgatgctacgatctttgcttgtgtgcaagacgggccgccagctagactgggtctcagcagggcacgtcggcgtctctacggagaaaagagcaaggatgcgcagcagtctcgcggcctccgcttgctcggagcccgtcgtagggctgaagcaagcccccaccgtcgttccctccgacccactaatactacccacctcgccttttgtagactgctagcgagcgagcattagtaggagcagactatcttcgtccgaccggcacttccctctcaaaaggcgatctccctctgccagctcaccgcccgatggccctcgacctcccccagcagctgctcgccgcccctccagccatcatgcctttcctcaacacgaccgacacggctgccgcccccctcgccggcgctccccttcagcttaacaacatgctcgagggcatcaggaggctgcctaatgtcagctacaacggcctcggtatcgtcccgcagatgggttggtgcgtcgcacctccatcccgagcttcgaccgcccgcggccatcgctgacccgccgcacttcgaccttgcctcttaccggtcgcaggaacacctggaacaagtgcgtcgctgcttactggcttacgctggcgatgggactgataccgatctacctcgtcccccagcttcggctgctcgatctccgaggagaccatcacctctgccgccgagaagctcgtctcgtccggccttcgcgacctcggctacacatgtacgtccaggccaagcttgctcgacgccagctagcgtgccaggcggctctatcgggccgcagcggtgccttgtccgggctgaggcgggggctggcgtcgaatcgatgcccgagctaaggcgccgaccgctgcactgcgcgacagtcgaggctgacatcttgacgcccgatcgcccctcagacgtcctcatcgatgactgctggcaggcctctgcccggcatgccgacggcaagccgcactatgacgaggagcgttttccatcgggcatgaagaatctgaccgacaagatccactcgatgggcctcaaggccggcatctactcgtcggccggcgatcacacctgcgccctccaatttggctcgctcggcttcgaggagatcgacgcccaggcgtacgccgactggggctttgactacctcaagtacgacaactgctactcgcagggccagcacggcacggccgacctctcgttccggcggtacaagaagatgtcggacgctctgctcgcgacacagagagatgtgctgtactctctctgcaactggggtcaggacaaggtcgagacctgggcgagttcaatcgccaacagctacaggacgacgggcgacatcgacgacacctttgacgaggtcaagccgcagtgccccgagacggcctggacgaacgcgcccgagggctacggctgctcggtcgccaacatcgtcaacaaagcctcgccgatcatgcagaaggccgtccggggtgcgtgtcatcccttgctgcccggcccttctgcatttgagcctgacgagatctgctgctcgaacgctaggctcctggcccgaccaggacatgctcgaggtcggccgcggcggcatgaccacggacgagcagatcgtccacatgagtctctggggtacgtcctgcctcccttggcctctcttccctccgaagctgacgccttcgtgcaacgcagccctgatgaagtccccgctcatcatgggccacaacctcaacgagatggacgacctgacgcttggccttctcggcaacaaggtgcgcatcgggatgcctgacttcccgtcgatctgtcaagggagctcacccccattcctcgcactggcgtttaggccctcatcgcctttcaccaggggaccatcggtggagccaatccactaatccatgtcactggcggcccgggcgaggtccagatctggaaggccgccgttggcgacggctcgttcgccgtcgccgtggtcaactttacgcccgaggtttgtctttcgcgtcagccctcctgcgtctcatctcctctcgcgctgattaaaagtgctcccctgcgcctgtactcttgtcctcaaatcagaacaagacgctcaacattgacttcaagacgattttccgcgacgacggccgctctgcgcaaaaggcaaccttccgtcccaacgacttttggtcgtccgagcactttccgctcgcggaatcaatcgccgccgactttggctcgaacgccctgcccgacaccgtctcgggctcgcttaagggtgtcgaggtccgggccaaagccggccgattttggaagttcgaaccggccgacgaggaaaaccggaagcgggcgctcaaggacgcgtatgcgatgcagcccgagacggccgcttgatttctggtagtctacctgctctcctgtagattctcatgacgattggaagcgatcattgtatgagatgtgcgcaaggcggtcggcgagtacgaacgagaacgattcgacgcctgcgcgtgcggccggcctcgcctaccttggactcgttgaccgacgctccctcgaccccgacctcagccccgactccgaatttctttgctgctcgccactctcaacgaacagcagcctatgtcctcgcctgcagatgaatcagccgtcccgtccaccagcaattccgagccgaccgttgcctctggctccatgagctcgcccgtcgctgctgccgccggcacgctgtccaagtcggcggccaagcgggcggccaagcaggccctctgggaggaaggcaagtgcgcccgtcgccagcgtgagaaggagaaaaaggcggcccgcaaggtcgccgtcctcgagcagatcgctgccggcgacaccgagctcgaggcaagccagcgagagcgggccgagcgcctgcgcgcgaagaaccacctcaagcaccgtttcgactggaagacgagtccgacgacggggcaaaaggcgccgaaagacgaggccgagtggttccaagcgcgttgcgtcgtcgatctgggctttgacgagctcatgatggagaaggtccgtcgatgcgccgtcggccctgcccgctacgtccgtgctccccttgctgaccggccgctgcctcatcctccgcccccctttccccgataggaggtgaagagcatggcctcgcagctcggctacctctggaatatccagcggacggcggccgaaccgttccggtcgctcgtttttacccatctcgaccagcggctcggccagaacctcgaggcctcgatctggagcaaggccaacgggcgttggcagacgaccgagtggtgggacggcagggagctcgacgagctgtggaaggaggcaggtcggttcctcaggcgctgtgtctcgtctctgagctagctagtgcgctgttggctgacctcgcactactctccctcccgatacgcagctggatccgagacggcctccccttcgtcgaccgacgttcaggccaatgtcgaggcagacagcagccggtccttgccctctgatctcgacgagtcgaccatcgctcaggtccgcgagctgccatcgcggtctaccccggccaatgtcatctacctgacagccgactcgccgaatgaggttgcgacgctcgaggagggcgcgacttatgtcatcggcggcatcgtcgataagaaccgctacaaggtgcgtggcagcgcgagtcagatcttctgaggcttctgcactcgagctgaccgcctcgttgtccacgatggatgccagagcctctgccttgacaaggcgcacaagctcggcgttcggacggctcggttgccgatcggccagtacctagccgacatgccaacgcgcaaggtcctgacggtcaaccaggtgcgtccgcgtgtgagcgcagataactctgactgtcgctgacctggtctcccctcacaggtttacgagatcctgacgacgtggatcgagacgcgcgactgggagacggccttccggcgcgtcatcccgctccgcaagttcaccgaaggccatgccaacgcaaaaaagaagcagaagctcgcacacggcggcaaggacggcgatgagcccgcgacgttcctcgacgccgaggaggaggacgtgccgtccgcggggcctgaggtggaggcggccccggcagagacaacggagccggcggcacagagtgggcagctgcctgcagtagaagacgaagaagcggccctgaatcaatgatcgcctctatcgctggcggtagcgattagccagggcaggctttgcgttcttcccagtgcctcgattggtacgcgaccctttcgggcggacgagatcatgtgactgcaccgacgacatcaccgctcagccccttgtctggcgacccggtcctcctcgagctctgcaacctgacgccgtcatcgcctgtatttccctgagccccctcgctctctgcccattgaggcatagtctacgtccgccccccttccttggtcgccgactgcgaaccagtttctcgtggtctctgcctgccagacatcatcgacacctgcctctgtttatgtagcctccgcgtctgatcatgctctgctcatcccccctttcgatctcaagcaagctgacgcgtcgagagcagccctcccttgagaccgtgaccgcgaaacttccggctggaagacccgtcagggagcgtgcgactgcgacgacctctcgtctgcctgatgcggcaccgatggccgatgctaccgcctgcgagctgtgtcgtgaacgcgctctcatacccacgagccagacggcgagacctcgtcgacgacgcgtcggccccgatgcgatgcggtcgaagtgcttacatccgacagcacggccccaggtgcgcgcgacccttcgaagagagtcgaggtaccggaccagctgtagagtctgtacagcggacgctcgctcctcaaagctgtcgagttggcagagacgcgcatcctgttcagctctgctactgttagcgttcggccaagccaggtcggagcaatgcccaggagcgaccctgctgtgcgtgcaagaagaaatctcccgagcgttccaaggcggaagggagagagggaagaaaaggacccgagcgagggcgtcgggggccgagggcgatcgggccatgaaagggcgaggctggccgccaccaaaattcgggcagccaccgccggtcgtctctctcgcgcgctgagttgcctcgccggcagggagagagtcagcgctggccctttcgagagcagcagtcagcagagcagcctcgcttcgaagctctgtcggtatgagggaggacgacaagggaagctgctgcgactgcgcgtgcgcgcaagtttcgtggatttccttatttttttccgcctcgagtcgcgttcgaggccagtcgagccgaccacgagggatcctctcccgcgccccgcaaccttgggccgccgacggtggcaaccagcacccgccccgccggagaggccggcgactcgcaggctgcctgcagcgcgggctagcggcctctgtgggccgagctctgggtcgtcggcagaagcggtcaggcagaggctcggctgggaggtcgggcgctgacctttcttcctgttgctcacccacgacgatctgacaacggtcgccctctctctctcgtgctcgtctgctcttcttgccgctgttcgctcggccaaagggtgcccagccccccggacggtcgatcaactcatcttgccacgctccctccccccggagtccggcacggcgctcgtttcgctcgcactccggctcgtggacggagcacgcctctcaggccgcttcatccacccactcaaccaacactccgtcgtctgctgtctgcccgagctctgctctctcccttttcctcgtcatcttgctccttggcattctgacctcctgctcggaccctatcgtgcctggtgtcctgtagcgtcgaaccctccatcttccggcaaccgcccggaaagccacagccggctccccagtttcgcgtcggatgctcggcgcctgtcgtgccagggcagccctcgctgtcttcagttttctcgcggccctcccgaaggtcgctggccaggtggcagagggcacagagggcgacggctgggtccagatcggcccggaccaaggcgacgagttaggacgggtgacgctcctccagtcgttcaacgccggctacagtgcggccctccgtgcttgacagttgatgcagcaacggcttcgctgatccccaatctgcgcccgccagtctgcctttctgtcgttcttgcgatcctcggcgccgcttgcacgctcgagctcctgctccggaggtgcgtctcccagtcggtcgaaaggggcgtccggttctgacattgattttcccgcctcgcattaggacgtccaaccgaggcgcttggaacatcgctctgatcgtcggtgccggcacctcctttggcgccatttcgtgctttgccctgcactttattggtgcgcacgccctcggaagcaagctcggacgctcagtccgctaaccctacaatctccctcaggcaacaactcgctcctcctcctgcgaccagcctcggcgattgagcccgcccgcttcctgacgctccagtacgatgccggcttcaccgtgctgagccttgtcgtcagcgtgctcaggtcagtctgctcaaggtgcagcagcggcccagacaggaagactgaccctcgtccctcctctggcagcatgatcgtcgccttcacggtcatgggcctcgacctggaggctttctttcacaagcagcgaacgaggagcctctcgataaccgagagcgaagcgagcattgactcgcacgacgcgactgagaaggccaagccggcagctgcgtcgaccctggcgagcacgaccgcttggccgctacgctggctgtctggccgggcagagccagatgcgcctgccgtcgataaggtcgccatgcaggaaatcaagcggcctggcctgacgtctgcttccctcgctcagcataatctcgagacgaagctaacaaacgccgcagcagcagccaggtcttcgtctgacggcggaggccacacgacgcctggcgcggccgcactcgggctcgagacgtttaccttcggttcctcaccaccggaggtggcccggccacccgtcgcgcttcaagggccgatggacatcgctccggacgacgccgatgaggacgaggaagagcgcgacatcgaccgggcgcggctttacgcctcgctccggcacaactttgcctcgtcgaacgagcccagaacccaagagccggtagccgaaaacgcagaggccggaccgtcgaggccgatctacaatttgccgagcgtcctgccgtcatctccgacgtcggacgaggcgccgagcggtctcgggctcgactcgagtagcctgtcggcgcccctctttgcgccattcatcttcgcttcctcggccggactcgagcgcccgtcgcgcgcgtcgtctgcctcaccctctcggcaggtccggaccgcggtcgctcgctcggacgcagcacgaggcacctcgcccggccgacagccgaccgattcgacacctgcgacgccgtcctctgggctgtcgtcgcgaccggccgcctcgccgtcccacaggccgacgtcccacgcgccacttgccatcaaggaccagatgactttcgaggaattcgagaactcggctcacggcggcggccggctagccctcatccgcgggagcgagagcacccaagggtcgttgggcaggccggtcatgcagcggcgccactcggcggcgtcctcgcacgaacgcccagcatcacagcggtcgcgacggccttcggccttcaccaatgattctggtctcaaaggcgatggctgggagacggatgatggtggccccatcggcggagggcgctccgcagcaccggtcgctcagcgtctcgcagggactcgccacggcaatcggtcacatcagcgtggcaagtcgcaagcggctgcctaccgcgatgaggaggaggcgctcgcccacttggcgtcgctgcagcgctcccaggatttctcggtcgatccgagctcgatcgtctcgcaaggcgggccaaagcagctgtcgtgggccgcgcggcaccttggcatcggacagagcacacggtccgagacgattaaggtcctcgtcgccggcaccatctgcggcttcggagtcgctggcatgcgtgagtcctttcctttcctgcgcgtggccggtcgtctagcccgactgacttgtcgcacacgctccctcacagactacatcggccagcgcagcatcacctcggttcagcacatccgctatcatccgggtatcgtcgttgcctcggtcgtcattgcctgcgtcgccatctcggccggcttgttcatccttttcgtcatcctccggccaaagcttcagcacagctacatcaagcgtgccctcgtcgcctgctttctcggctcggcgacgagcgcgatgcactatgtagccatgatgggcacgtcgtacgccgtcgacgtcggtgttgtgattccgacctctgcccggcaacggcgggcaaaaagggtcatcactgcgctcgtcgcctcgctggccgtcgccgcctgcctcatcaccgttgcctcggccgcctttgcccagcggcagctccgcatcaaccgtcgcaagcgccgcggtctcgtcgtcactgcagccatctttgacgaggccggtcacatgctcgtctcgcccgagggtgcgatgccggtccagaacatcgcgctcgacatcgtccacatccgatcctcgctctttcagcgatcgttcgcctcgcgcccgggctccttctcgggcgagtcgttcaactcgagcatcttgaccgccgagtttgaccttacgccgcagcaccaggccttcatcgccgctctccgccggacctgggcctggcgccgaggcggcgacgaggtgcctccgccgccacgcctgctcgccctgcacaatgcgcctagtcagacgagcatcgtctcggaagacgcgatcgccacggtcgacagcgcctggtcggccggctaccgggcggctgccgtcgggcccgagcctcccgtgtcgcagagcgttcagcgcttccttgagcgctttgctcactcgaccggccggctcgccgaggaggtgaccggctcggccgagcacattgggcgcctcggcgtcatgtacgaccggatcctgcagaccggcttcctcacgttcggcagcaacggcaaagaggctggtccttccgactctgcctcgagcggccagatgctcttcctcgtgtgagtgattgcgcttgagcggctgcgatcgacgcacgacctgacctccccccttttgactcacagcaaccgcgtgacggctgagcataagagccagctcctacgccggggcttcacgttccactcgccgcaggccgtcgctggtgtcatgtcggccgcactcgccgtcccagctgccgacatgacgaccttcctcgagtcggtccagacgttttcgaacgttctgacctcgtcgcagctccagcggggtcacatttacgtctcggcgctcgtcgcccaggctttgccgcatggcctgcaggtcgccgtcggtcgggtcgaccgcaacatcctgccgacgcgagagctcggcacatttgcttcgacgacggatcctgtcatcggcagcgtcgccggaccaggccttcaggccatcgctcaggacattggacacctcggcgagctcgtcagcggcctggccggcgcgtcgctcctgtcgctcgtccgactcgacctggccggccaggcggccgacgacccgccgacccggctcaaacagctcctcgccaaggcgctccttccgctcttcgaccagacgccgcctgcggtcgcccacctgatctttcagcacctcgtactcgcgccggtgctcgttccgctctttccgccgtcgcaccgggcgtcgcgtgtgccgtcctactcgatcgtcttccgagccgtgctcgagcccaacgtcgacgtcactgagctcggtccggccctctcgttcgattcgttcaagctgttccgcgcgagcaacgagtgctttatggccgacctcatccggcgcgacggcctcaaggtccagcgtgatttcacgagcgagccctcggtcgacagtcactcggcgttcggcggccttcagcatcacgcccgacgcctgtcaaaggtccactttaccggcctcagtccgcagcttgccggccagacaacgccgacgggcggtagcgaggctggtggcagcggcttccacctcaactcggacctcttcgcagcctcgttcggtcccaatggtggcggagggagcgtcacccagtcggcgaccggtcgccggccttcgatcgtctcgcacggcgtcgactctgcgccgtcgtcgcccccgccaggtgtcgctcggccggtcctcaaccgcctgcgttcgcaggacggtcggccctcagcgtcgtcggtcactggctcgctcgcctcgcaacggccgtcgatgagtcgctcgcgctcgatcgagacgtttagcgctcggccgagcgttgccgcctttgacccccagtggatgctgggtctcttgcgcgaggagcgggactgaaaggtggtctgccagtgctctgccatggtcatcttgaccagtcttctcccgcctgcaaccgcgtttgagggaagcatatgaatccgcgacctgattcacgtccttgacttccactgccgcctcagatacaccgtcccaagcgcgccagcaactgtcgccccgaccgcgcaagcgagcacgccctgaaagcagcccgacccacggcagaccttgcccgcctcgtcatcttcctcgccggcactgatctcgtcggctggcgaggtcgcgagccggtggcgctcggccatgaggccgtagagaaaggtgaaaccgagcgaggaggcggccatgaagtaggactggaagccaaagttgctggagaaagcggtcgggggtcgaggaaggggagagtcagcgcagcgaaacatcagctgagcacgactgaagcaggacgcaccggccaaacgtctggaggccaaatacctgggcgatcaaggccggggccaaggtgaagagcagtccgtacgacatgccgacgacgaccgtaaggagcggcaggaggctcgcgtccgtcaagccaccgacggccgcccagagatagacgagcccgagcgggaacatgacggcaaggaagaaggtaattttgctgacccttggcctccgcagtcggccgatccactgtcggccggcagatcgcgagcgatgggcgagcgagagcggggcgacgacggtattgagcggggccgagagccagtcggccatgaagccgccgacgagccgggcaagcgtgttggcgacgctgaagaggaggacctggcgtgcctggaccgccttggccgacgaggaggaggacggcgaggccatgatgtggaagggtgaggacgacacgggctgagagaggagcgcgtgggcgagaagcgtcgaggtcgaggcggacgcagtcggaggagggaggagggcgaggatgagcgagccgagcgacgagatgatcatttcggcctggaagcgggtgaattaggagcggaatcagcaccgaagcccggcaggaggggagcgatgtcctcgcttggaacatactggcccaacgacaaagaagaggatggcgccgaggacccagaatgagcgctccctgataagcatgccgatcgggagatcgacgaggctgccgacgcccgggccaacctccttcagctcgccctctccctcaatcggcgccggccgaaggagcggcgtctcttcgtcaaaccgctcgagtgcaggtggggcggcctcgtcgacggcagcggccgccaggtcgtcctctgccgcaaggattgcccggccctcggccgacggcatgatgcgcaggcctgctgcaccgaggacgtttgacgccgtcacaaggaaggtcaggaagcctacgagccgccgcacgtcgagctcgcccggcctctcctcgtcgtcgaacgcgggcagattggcgagggcagaaaaaaatgcgcccgagaggccgaagaaggcgagcgggacactgagggcgaccgacgggtgggtcgggaaggtcaaggttgacgtcttcagcgagcagaagtaggaggcgaccgctccggagccgatcactagacagagaggtgagagaatggtgttagtcgagaaggaagggttcgtcgacggcggaagtcgacggcgcgcgcagtcaagcgaggtgtgcagcagcagcagcagcgagacgagggagggacgcacagacgtaagccactgccagggcgtactggatcggcagtcctcccgggctggcatgccggtcgctcttcagcagctggccgaacgcaacgtagcccgctccattgagggctgcgccgagcaacgacgtccagcgcgagccgtagcggtcggcaaagagcccgaccgggccggccgagagataagtgccgagtaaacctccgacacagaccgcgtttgtccctgcctggtcgagacggaagcgatgttggatgtagggcgaaaagagggcgaaagcgacgacgccgcctgcggtcaggctggggaaggggcgagagcggtcagcgagcgagggagagagggcgccacgcgggtcgctgcaacgcaccagttggcggcgatggcgaggtagacgatggcgagccggccgagccgcttatactgccggttccgtgcaggctcagggtccggcagacggtctgccagcgagcgagcgagcgaaaggcaacggcgtcagtcctgctggagcagtcctgggaggcgatgcagggagggttgaatgatgtgtggagggcaagtcgtcggacggaccgatcgcttcgagcggctcgtcttgggcttggaagaggggcgcgctcatgttggagcgagcggcagacgatagggccagatctcaggggggaagacgaagcgagatggctgggtggggcagccgtcgaggtcggtcgaaggtcgtcgggttcgtccgacggtcacggcgctgcgccagccggcccgccctcccccctctccgacgcacgacgtgctttcgcccgacaatcaactcaggactcgacccgtgttccaagtcgctgaggcgataggttgcaacggactcttctaatactcgttgagcagcccgtcgaccgtcttccaccatctcgccccctcctcgccttcctcgtcgagcacccgctcgccaagctcctccttcgtcagaaacgcaaacgcctgtgcacctccggccttctcgagccggggcatgccggcgaggacgtgcgacttgaagatgaaggtgaaggtcgtgggcagctcgctcggggaggccgttggtgatgaggggaggcaagcgatcgggaagcggccgacgggccagagcgagaggttgggcccgagctgggcgagcgcgttcgcttgcgcgcgctggaggggggggggagaaaagagggcgtgtcagccggcaggcccagacagcttcaggccgaaggaaggccacgcaccgctgccagaccgcgctcatcctcgccctccgcctccggctcggcagggacggcgatgccctcgcccgggaagcgccacttaccctcggcgttcttgacgacgaggtagacgctcctctcgcccctccgctcggcactctcgagctcgctctcgagctcgaccgacggcggatccggccggtccctccgctcctggacctccaagacggccgagtcgcgctcgacaggctcaatctcgctgtccttctccgatcgctcaaggccaaacgcccggcgctccgcctcggcctcctcaaacgcaaatcgcctcgcagccagcgagcccttcttgaagtagatgttctcggggagcggggcgctgagcgcccgccgaaggcgcgcggtataggcgtgggttgcctcgaggaagggcgcggtcgggggcgtgaggtagggccggcggtggaggaggagctgggtgtgcagcttgggcggcggcgaagccgcgtcggttgaggggccggcagaggtggcggcagcggacgcgctgggggaggacgagatagtccgggccaacaacgatgaggggcggactgttgacgatacaggaggggccgagaggtcagccggcatgctctcctgccgctactagccgtcctggcgaagcctctgcttgctcttccgtctcacgacgcgagagaaggcgctgcgaccggcagagctccctagccgcagatgagcctattcggccacgaagaagtcctccgaatccctcctgccgtcacgtagcgcccatgcactaggtggcgcctgatagagttcgaccgccgccagtcggcttgagcggcaagtcctggtcgagcgagcgacggaagtgcgtgcctaacgagcacccgcccagtcgccgactggcatcaagcgaagccgctgtgtcgcggccggtacgacagatgctagacgccccgtcggcagaggtggctcttgcgagacaacggccgatcgtccgttgaccagccgaggtcgagcctgagccgagctgggcgggcaggctgccggcgagctgccgacgactaaagggtctgccgaagaagcgagcaggaaagcgactgacgggctgaccaccgcggtgcggctgaccggagaagcgagcgagcggccatggaagtgtgagcgtgggcgcgtgtagtggctggaggtgtcgtaccgaggtcgaccggcgtcgcggagtcgtcgtcgcggcgggccgcccgagccgtctaagtggtcaatagatgaatgtgagggtttcatctacggccgcgcgcccgcgcacgtcgtcctccgctcggtcgaccggcacctcgacctcacactcttacctacgccaatccccaaacgtacgtcctcgcagcaaacacagatgggatcggcagagatagagctatgctgacagtcgctcctcccactcctcatcctgttcgatgtacgccgtcgctcgatccggccaccgtctgcgcctcatcaacgatccaatccgacgctcgcgctttccgccgcctccgccgctctccccctcctcgccttcgctcgcagccctccctcaaaccctacactaccaaagatgcctatcattggtggacctctcggtccttcgtgcgtcggcctctcgcttctgccgtccagaggagttgtctagcgcggccgcgtgacagctgcccatgaagcgccgcgccgtgccgcctctccaggctgccctccttcctcaagcttcagatcggctgactagaagcgctcttctccgccactgctcgctgcccgatcctgccgacgttctctgcgctgtctcttcgcccgtccaccgcccggctccgcttgaaaccgaccttcgatccgcttccattgcactcgtgctcgcctccgtcgtcctgcacatgcccaccaccctgtctttctcttcacgcctttgtcctccgctcttctccaacttccaggctggccccttggatccgctccaagccctcgctcctcaaggccctccagccgatcgcccagatctacgccaacgcctgcggctaccgccagctcggcatgcgctacgacgacctgatccagccctggtcgaacgaggtccagacggcgatcggccggctgagcgagaacgagggctacgaccggcagttccggatccgtgcgtctcgctccttcttgtctacgtggcggctcggaggctgggtagatcgggcgcggtgcgagaagctggtcccaccgcggccttcaagccgtgcccgatcgagcaccccgagccatttgtagctccctgtaggctgaccccgttttcccctttctgctgctcacaggccgcggcattcagcagactatcctccaccgcgacctccccaaggccgagtggactaagcccgaggatgacatccggtgcgtccctggcctttaaacctctctttctctcaccccctggtctctctcatcgaggctgatcgagcctgctcgtccgcccgcctgcttgccagctatctgaccccgcacgtccaggccgtcatcaacgaggctgccgagcgcactaactgggacaacctctccgtcgagaagcgcgcctaagtcgctcgcctcgcgagtatccgacagagggagacggaggaggccgagcgtgtaggggagggcgttgggagtggccctggattttctgactgaaccgatgaggttgtttctgctttgccctttgtccgccgtagaagggtgcttttggacaagggggcctcgttctacaagcagggaggcgggcggctgagaggggggagagacggaggcaagtgctttcgaggggagtagcgttcggctgaacgcactcgaacgacgcacactggcattcccactgccggcgcggatcgttcgcagcctgcctgtcccatgacccaatgttggcaacaggcatcgtgaggggggagttgacgctacagtacaaaatatccttgaggagagtggagcgaagcgcaagacgaacaaggcccggatacaagtgcgagactgggatcgaaagtgtccagcgaaacgacgagcagaagcgtccagacagaagagctgagcagagagtggagtgtcctggagcgtgcgaaagaagatgggggcccgatcgagaggcgtttgtcgtgcgagagcgcgaagcttgagaggcggaggcgctcagagggtccagacctggaagccgtccgagtgcataaagggccagggcgggtcagcgagcctcttcgatagtacctcacgaacccggcgcgaggaaacactcgcctggttcctgttggacccacaagcccaagtctggacggttgcgccctcggccttattgccgtcgcgcagatccatgcactggtcgccgccgaggatcgctaggtggtcgtccccgggctgtgtgtagaaccactgctgctgcgggagggtcacacctggataattctcccagacctgcggcaagagaggacgtatgagtggcgaggccaggcaaggggaagcggagtgaggcgcaccttgagagcggtgccagacttgatgggcagcacgccggcgtcaaggcagaaattggtcgcatacgtgaggcagacccggccgctgccgcgcgagatgatctgtcgtaggaaggggggggggagtgagcagaatgtacaaaaagaagaattgaagggcaggctgacccagccttgatttttgttgtcttggacacacttgaagctgagagggcgaagggacactggtcagacaaaaaccgcacccgagtcagagggtcgacgagagacgtacagctggacgagattgccattggcaggcgagaaggctcgcgaggacgacgtcgtgacgaccgtcaaacagaggctcttgtcgccgttcgggtgaatgccggtgtagccgacgaaatcggtcggctgaggtggagcgaccgaggtcgtcgtctgtggaggtggtgacccgccgacggtagtccaagcttgagccccattattcggcgaactggggatgcggcaaaacaacagcggaggggggaggatggtcagcgggggcggcctcggaaaagagagggcgaggtcacgggaacttgccagagccaggtctggactttgccttgggaagagtcgaagtctagacactggttgccgccggtcaaagcaatgcctggcaaatgcgaagggggtgagtggcgtgccaagaagggagtcaggatgagagggcgtacgattgtcgtctgtgtagtagaaattctgttgagagaccgagagacaagtccagacctgacagagcaagcgaggactcagcgcctgcttgacacggaggcgggactagcacagaccttcatctgaacgccacttgctgggtctgtaggcgtgagagggcgcgcggcgtcaatcaagcagccgcgagcatgtctaatgagccagccgacatactcaggcccgcgtcgaggcagtagttcgagttcttgagccggacctggcctgagccgcgctgaatctcccaaccttggaggtaagagggggagttgaccgagcatgcggccgggacgacggggttgccgttgccgacgataccgcctgcgccggggacgaccgtcatgcactggtgcggacagtcggggtggaggacaaggttcagcttccctttggtcaggcggcggagcagacaggtgccacttaccgtgctcagcgatgaggagggcttgatcaggatcccagacgatccagggtcggtgatgaaggttggtgcgccaaagaccagcgcgggcgcggcaagtagcgtcgagaggaaggctgtagcgagcatggttgtggcttctgctgcctgggcagatgggttggtcaagacgggggtggaaggtgggcaagagatggccagcggccgagcttcaacaagcaccgttttagctggcctcgcaccgggaacctcggcctcggtcaaagtcgtcagctgatcccggctctcatctcctgtgcaagagcgccacagagtgacagcccgttttgccgacgagtaaaggggggcgggccgggcgggcagagcatgcgccaggtcagcccaccaactcgctgcgccgccggctcgagcgggcgcgcaggatggcctgatcgggcaggcagctcctcgtcaaggctcgaggagctggcaggatccatgagccggacggacgagcgagcaggcgggtcgggagcgaagagcaggcggcgcggtcgaggtcagatggccccggcccccggccgtcatggaacgtcgttgtcggctctaccggcgggttggcctggccaggctgcgggttcagctgcttggccttgcctccgaccagccgtgcctccttcgagctccaagcggcgagcctcgttcggtcacccgagactgtatgttagcaccagcagtctgccatcccagaagagagaagagaagcctcgaatgtacaggcagacgtccggctctggtcgtcgtcgtcgccccgtttgggccggcgaccgccgcgcagggggtgggcaagtcgggcacgcagctcgtcagcaccaggtgtccggctacacgaacagctggcgctcgtcgagaccagagcaacagcggcttgtgcgccctggctgagatgagaacattgcggtccgggctggcaagcggggaggcctcgttggctcgagtggcgtcggccttgctgctgctgctgctgcggtcgagcaccgcttcgatttcgacctgcgctcgctgcgtaccagcacggacgacctggctgctcgacctcactctccaactcacgcagcgacctcagcttgcgcccctgtcagctcgcctttcgctgcctgcccgctcgtcaggatggatcccgccaggacaaagaaggtcgcccgcaaggtggaggaggccgccgcacgcccgccgcagccgccagcacgcttcgaccgagccgccgacggctcgagctcgcgcggtcgaggagggagccgcggtgggcgtggcggcatgtgcagaggaggcaggggcgcaagctcgtcgtcagcggcggcgtatggcggtcggagcgagcaccgccgggccgacgggagcggacccgatcgttcgttgacctaccagcagcggccagcgcgctcgatgccgtacgcccggccaggcggtccctcaatttcaactcgtggcggtgaaggcgctggagacgaggcttcgtcgaccggaccgcctccgaccaaggcccaggcgtcgctttcgctctcaaacctgccgctaccggcccctttgccgtcgctcgcgtcgcacccgcacctgaaccggctcgacctctccaaggtcgccggtgggctcagcggcgtcggcgtaggctggttgggcgatgcgttcggcgctcagattacctggctgaacatcagccattgccccggactcggcgaggccggtcctggtgcctggcgcggcttcgagaagcttaccggtctcgtcggtgagtcttgcgtggggtcgagcacatcggctgccttcgtcttagagtggtcggctgacgcctttcgcctgcctcttcttgcagtcctcacgcttcagagctgtgcgctcaccgagctccctctcgagtttgcgagcctgcgctcgctgaaggccttcgtcgcgacgcacaacgagctgtcaaccgtcccggaagaggttgtctctgggtggcccctgctcaactcgcttagtgagtctccttgtcacggatgctgtcctcgccacctcgctcaccactgtggccttctcccagtcttgtcgcacaacccgcttcagaccctgccctcgaccctgccgtccttgatggcgctcgccaagctctcgctctccaacacgcctctcccggcatctgccctcgaatcgatcgacctctcccctctcccttacctgcggatgctttcggcctcacacacgccgcagctcgaccgactgccagcccacttccggacgtggggaaccggtctcctgcctgcggccgagggctcgcgcttcgaccggccgttcaacagcagcaaatcggccgagggccggcgcggcgacgggctcgaggtcgtcgagctcggcgggagtggcgtcacctggaaggggcttcaggcgggcgtcggggagggcatgcctggcctgcgcagtcttggtctcaagggctgccctgtcaccgagcgcgaagactacaaggactcggtcagtcgctgtttccctcactcaccggtcctcactcgcttttctgacgccatgccctcctcgcagatccttgcgctcctgccggcccttcagattctcgacaacacgcgcctgatcgaacgcaagcgcaagggtccggcgctcgttcagcccctgacgtcctttcaggcgtccaaagtgcctggaaaggaggagattgacgctgcggccgtcgctgcccgggctgccgagcgcggcatcgccgttcagggccgcaagcgcgagtggggcgtcaagcggccggcaggcgagggtgatgagggcgctcaagccgacgaggaggaaggggacgaggaggagcgtgaggctcgccggatgaagcgtacgcggcaggccatcgaggaggcccggcaggcggaggtaggcgccggcaccgatggcgcagacgccgacgattcggccagcaagcggaggaaacgcaagccgcatgccgcgctcgaggcggccgcagagggaccgtcaacgagcaagaaacggccgagcaagaaggccgccgccgccaaggaggccactccggtcgagccggccgagcccgaggttaagaagcgcaagcgcaagccccattcagcgccggctgccgctccgacgaaagacgccaagtggcgcgagaagcaggcgtccaagccggtcgtcgtcgctccagtcgaggagccagcagctgccgcagtggcagagggcgcagagaagccgaagcgcaagcgcaagccccggggggcttcgccgccgcctgacccggccggtgcggcgccgccgaaggctgccgagaagacgtcggtcctaaaggtcgtcgaggtgaagccggcgcggcgcaacaagaaggctggcaaggcatcctcgggcgggctcgacctcgagcaggcgttcaagcagcccacggcgagcgtcgagcaggccgacgccggcggcggtgcttttggcaccggcggctgggacgactgaagatcgatgtggcttcagaaacgaagtaaatccgcagggagtgagagatggtctatgaggaaacgctggggagcgcgatgacgtgaaaatgagagagatgagagagggggagggcgggaagaggccggcggtctagctgctaccggaccacgtcttgcccgggtggatttttttccacttggacgtgcaggagaaccagtggtcgtcaaagttgtccgcctcattgcacgagcagcgaccgctagcgtgtgcctcgccgataggacagtgtgagtagggcccgtgctgataaaacggcggtaaattgagcaaagtcgtcagtcatgagatcctggcgggagggatcgacgcgaaggtttgccaaaaggacagacgtaatacccaatatctgaaaagaagcgggttttgtcctttggctacagggcgagggcgtgctcggtcagtagcgcgtcctcggaaggccattgcccgacctcgacgcaccgcaaacaggccggctccgattgaatgaacgggcgcatcgccccagcgctcatagtagaagccgccggcggcctcgaggtggtcaaagtaggccgagtatgcctcgccacgccaaaagtcgaggtcgccgatctcaaagttgctccagaagtggcactgcggcgcaaggttggtgtggtcaatgcgccgtcagaggaggggaggtacgctcgtcgcagggcaagaagagatcgctgcgcacgtggttgtactcgttgccgccgtcgtccgagagaaagtccatcgagttgtcctttgcgaggtactctgggtggaggccgatgaatttcttcgtctcgtcccagagcgtgacgatcgtctcggtgtactcgtagagcgagagcgtaaagccatagacgagctcctcgtcctccataacgaggaacgggtcatagttgatgtcgcagtaaaacttgacgctcggctcgacccgccagtagtagcggtacttcatcagaagcgggtgccggtagaagaagcccgagttgaagcggcacatgttgcggtagggcacgcttccgccgtaaatgacgttttgggcgaccatctcgtcgcgcgacttgcgggccttgtcctcgtcgatccagtcgggctggttccactcgtccttcgggatgaggccatagtggaccgaccgcgaagcgatctggctcgtgtactttttaaagtcggcgtcgaacggttggtcgttgaggaagacccagtcgtagcccgcccaccagttgactgaggtgagagagctcgcgggtcagcccatcggtctagcgagggcagggagggacgacgacgcacagcggtcctccatttgctgcgcacgcgaggcgaggtcaggtcgtcagcaaccggtcgctcactcagtcgctcatgagactgacctgcatggagggaattatctacaacgggacagagcggagcgtcagcttagcagccagtgaagaaacacggcggtcgccgagaagggggaagctcacctcctgttgcggcgcagagggcaggtcgcgtcacgaatggtgaggtcagcagcacccagacggcgagagcttcagcagctcttccgagcgtacgcacccagagatccgagttgcgggcgaggacgacaaaggtcgcgttcgcatgccggcggtcggcgccggtgccgttgaagccgccgccctgccggctgggcaggttgggcgggtagggggagtagcgcgagccagcgccgatggcacctgcgccagcagcgagcgaggtatagtgcgtcggcgaagccgggtgaaggatcgctgtcaaggcgaggagggcgacgccgagcaggatgagcgtccgcggccgcggtacggtcagggtgggaggcatctaggctaggaaggaaggggcttcgggcctcggaggaggtcgagctacgagaggggcggcaggcgaaggtgatgtcgggccggcggtcctgcttgctgctagggggcggcgctctgagctggaggagcgagtagagagctccttgaagtggaagagggcgagatggcagtcggtcggagagacccaaagctcaaagcctgctgctagcgtccgaaacgtctcgccgcagcgcgtgagtgtcgtcgatcgctctggccggctgcacaggcgtcaccccccgtcgtgccctgccctgcgccagacttccgaaaggcatcctcatctactcgacctcgtcgtcctcgtcctcctctagaccaacagccggtccggacgcctctactgggctcgctaggccgagggcgctgccgttcaggcccggatgccggtacataccccagccgccgccgccgccgtcggtgctgccgttgctggtcgtgctctgcatcgagaacgacctcgctgggccgggcggcggcggcccttgctcacgaaacagccggccgatgttggcaaacgaagaccggcggaagccgccgttctgtgtcggcggtagctgaacagacggcgtcggcgggatgagaccttggagcgtccgcaggccgagctttgagagcgggttatgcggggtcgccgagccagatccgggcagcggtggcggcagaagaaactgctgcgtcgggaagagatgctgcgtcgaggctcgcgtcgtgaccggcgagacgacgggtgaggtgactagcgaggcgacttgcggtagcggtgacgaaagcaggctgtctgggtttatccagaccgccttgagctgcggttgacagcgcagaggcatctttgtcagcgacctgccaaaacaacaggcctcagcaaacacgaaggacgcaccgcggcaaagtcccactcgaggtcgtcggcccgcttgcgcagtccagctgccatggccgagccgatgcccctctcctgggtgacaatgtagtcctcgacctcgcgccggacgagctcgttggctttcgtcgtctgcccctcgtggccgagggcgagcaggacgtggaaggactcgaccgcccggcgttcgtcgtcaatggcgatctcgagctcgacccgcccatcctcgaggacgtccgagagccgcgtcatggcccggaccaagagcgccgagagctcgactgggagctcgtccgaggatggggacggtgtcgcgaggaggttcgtcagggcgacgttgaggtccgaatagcgagcgcgcagctgctgatgttgcgatgggagagccagcagtgaggcgagcaacgggtcctcgacggcagcctcgggcaacgccgcgggctcagatgggctcgccgttggctggaacaaagaaagaggagcttggcctagcgtcggttccgggtcgggaagcagctcctccgcgagcgcttcctcagtcgatgctgcagcgccttcaagctcggccagccgcgtctcgagatcgcgccggcgcttctgttcgagccgcaggtcgtccatcgtactggccagcagttcctcggccatgtagacacggctagcctgcgcgctaggtatcgggcgctcggtcaccgtctttggttcctttgagtcgagctcgagaatattggaggcctggccgaggaccggcatgagcgtcgcgtaaacgtcggtcgtcgacatggcagagctgaagtcgcccgcaacgtccgagtcggcaagctgggagacgacggcctggacgcgggtgttccatcggcggaggttgtccatgaggcgctcctcgcgggcgacggacgcgagtcggctgtatggcgggcgtgcaggagaaggtcaacactctgaagcgcactcgcctgaccatcgccagccctgcacgtacaggccaatctcgcgtcgtcgaccctcggcctcgatccaagcctcttcgccaacctggccgagtcgtgcgcgcgtccgctctgcctccttgcgctccttgccgagctcgcgccggagcttgtcgttctcctggaggaacgtcgcgagcgaggcgtcatgccgggtccgcagcgcgtgcagctgaccgtgcaggagaagcgacgacgactgcgagaaggacctgcgacgaaggaacggtgtcagcctcatgcacaggcacgcagttgcacaggccaccacgctcacatgtaccgctcgacgacgctcgctgcggccgcgtcgtcgcgtcgacgcctgtcgagctcgacctcgactgcaatgagtcgatcgcgcgtctcgctggcggccgcacgctcaatctcgagctcctgctcaaccgtgacgccctgaccgttttgtgacttggccgcggtcggctgaggctccttctcgccagcaaggaggggcgtgcgctgggcggcggcctcctccccatctggcagctcgcggccgtcctttggcgggactgggggcggggaggtcggcagctgctcaagcgccttcgcaagccgcatctcggccctcgcccggtaggcctgctcgttgacccgcctgtccgtctcccgcttgacagctgcgtcggcgccgtctgcgagggccgagagccggcggtgagcgagcgagagcgcctgcagcttctcttcgagcgcgacggcctcatctggccggaccgggttcgaccggaggacggcgagctcggcaagaagctgggcctgcgatgcctcggccgaccggagctggtcgagcgtgagggtatgctggagggacgaggcgtgtagcttgagcgaggtcgaatgagcgccggtctgcgcccgatgcagcgctgaccggagcgcatgtagctcgtcgacgagcgctgacgacggggcgtccgccatcaagccgagcagaggacggtgtagaagcgagcaaggcagagtctatgggaagccgggaaatgggatgaatgttgcgagcttcagacgagggggctgattgcggaggggcgcgatgagggcatggcgcgcagcacttgtcgaaccgcgaatctcactttcaagcgtctgatggtcactctgggactcaggagacggggatgactgaagcaagatgaatattacagaacggccatcagccatcgagcgggtcgatccactcgaccttttcccagacgttgacgcccccgaggccgtccttctccggccacggatgacagcgcacctttgccggcggcctggcacacgtgtagcggcgtaatcagtacggagcgcaatgggtaaggctaaggcagatggacgcacttgtcgacccagttgacctgctcggtctccttgccgccaaaccagcccgagcgaccgacgtccggctcaatgagccctccgacgtccgcctcgtccagcgcgcgcacgccctcagcgaccggacgctcgtacgcgacccgaacgccagggacgacgagcacctttgccgcccgcgcctcgggcccaaatgccttttgccgccagaggtccttgcagagcaagctgacctcggcctgcgcacactcgcccgcctcggcgtctgaccggcggaagtggatcggtggctcgccctctgcggacggggacgacgcaggcgtaccgaggaaggctgacgactggaagacggcgatgccgttccagcaggcgtaggcctggaaggggaggtgggcagcgttgcgcttgcggctaacgggcgaggtcggaaagaggtcggtcgagggcgaccagcttgtgctcatcgggtgatagagctggcgagcgcggggatcccggtcagctctgaaggggtggaaggcagcgagaaggggcggcagggaacaaacatcgccggtgtggacgtctcgagcgacccaggtgtcgtagaagtagctgagggagcaaggaaaatgtcagcccacaagcctggatgagtcgaccctcatggacgcactcgttgccccagaggaggtcccatgcgcagctcatgtcggccccctgcttgacgtgctggctgagcatctcgagccccatcgccaggctccaccagacgtcgttgaagaagacgacagtcttccagcgggcgggccggtcacgtcggagcggggcgactgcctcctccctcaagccggcgaggacggcgatccggttgtgcgaggcaaagtcggccgagggccggtcgagtgagaggtagagcgccgaggtcgggacgcccattgacagcaggaccgggacgaggacctcgaggaagaggtgcgccgtcccgtccgtcgagggaccttcgacgaccgagaggccgaagcggtccgggccgaggaaatcggcgaggccgacgagtgtcccaaagaggtcgggcgcgagcggctcgacgtcgagcaggaccgaggtgaagaggacacggccaccgtcgacctcgtcgcctttggcgtgcgtcaggagatgctcgaacctggcgtattgggccggcgagagtgcgggagcgaagacgggcggcttgtaggtcctgccctcaaggccggtcggcttgccgccctttgacctgttggcatcggcataggcctctacgaagagggcatcgaggtcggcgaggtggatgctaagcgtgtccgaatgggtgacgggcacgtcggcgagcgagaggttgcccgctcggagggcggtcagggcggtcgagagccgagcagtctcctcgtggccgagctgagcgatggtagcgggccggcgaaggctgctgctcccgctcaggaggtaaataccagcaaacagcaggaggatcacgagcgacagcggcctcagcaggcgccggacgaccaacttgacggccggcgggagagattcggcccggagccggtgaccatcgctgcctctgctgctgctccggttgaggaaggccggcaggccaaagatggccggcgggcggaccgggtgtggcttcaggtgtatggctggcctgccgctgctgctgctgctgatgctgttcggaagcatcgtgttgatcgttcaggcagagtgtcggaacgaggctctggtcgggggcgtgtcgcgttgcgccggggcggatccgcggaggaggacgagctcggcggtggaggcaagcgagccctgctggtcgctctgtccgatggccgacggctgagtgagaagagaagtcgaggctcgcccttcgtattgacaagaagtcggactgggagagataggggatgggcagcaggagagagcgaggcgtcctcttcctcggcccgtcttcctcgctcagagctcagcctcggaggcatggcggcggcgcgcagctctcgtccgccgcaggggcagcagcaggagcgggcggcgagatggcaggccagtagaaatctgctcgcgaccgctagcaggctggcatgttgccgagccgaccaacctagctctgacccgcccccatctctttcgtcgttgacaggccgaggccacgcacgggtgcatcggaggcagctcatcggccctcgcgggctggatattccgcagcggcaacgtcaccatgtcacgctgctgccctgctgcgtccgccaccctctaaccttctactcgctgtgatgagggtaccgggtacaagcaggagcggccgcgggcgggccaaaaggggggtatgcggcgggaatgtggacaagagggaccgaacgagaaggggaaaagtgtctactcgtcgtcgttggcgtcgacgaagcggaggcgagtgccgttggcaacgcgcgagaggacgccgaggttctcgtattcgagcacggtctccatcagttggacgtcagtgaagcccttggcaaagacgcgtgcccgggcgtcgaccatggccacctcgccgtcctcgtcatcgtcgctgtcgctgtcggccatctggccagcccggcgaccgcgccggccgggtccaccgccgagccgcttcggcttgcccatgccattggcgacggccatgtcgcggatgatgcggtagatcttggatgtgctcgtgccgtccgtgccatcgcgctcgcgggcggcgtgctcgttgaggctcgccttggagacgtccatcagccggagggcctcgtcgacgtcggcaaagttgacctcgtcggcgaagcggacgcgggcgtgcgcctgcgcgagccggaggacaccgagcagggttcgggccgaggtgtaggtcgaaaaacgatcctcggcctcgtcctccttctgctgctggcgcaggcggacataggccgagacgacgtactccgagatttcgcgcgggaccgtcggcctcttctgccgggctgcggcaatgaagtggctgcagcaggaacgagggggcgaacgtcagctcgtgctcttcgcaaagcgccaagaaaggaggcgatactcaccgcatgagcttcgagtcgatggcctcaaactcgagctccggcgcctgactgtacatgtggacaaaggtgatgtgctgagcaagccgctcgtcgtcgtcccgggcgggcgtgtcgagaatgaggaagaggacgtcaaatcgcgagagcagggccgcaggcaggttgatgttctcgaccggcgaaacctttgggttataccggccgtagagcgggttggccgccgcaaggatcgaagtccgggcattgagtgtcgtcgtgatgccggccttggagattgaaatcgtctgctgctccatcacctcgtggatcgccgtccggtcagactcgtccatcttgtcaaactcgtcgatgcagcagatgccgttgtcggcgagaacgagcgctccgccctctgcagaaggaggtgatggcgtcagcaggctaccctaagtgcgaagaggaaatgggggacgtaccgagcacgaactcgtcggtgacggggtcgcgcatgacggccgcagtcagaccgacaccggacgatcccttgccggtcgtgtagatgccacgaggagcaaccttggagatgtacttgagaagctgcgacttggcgacaccggggtcgcccatcaggcagacgttgatgtcgccgcggatcttcatgccgtcgccaacgttcttggtcacgccgccgacgaggaggagcaggagcgccttcttcacgtcctcgtggccgtagatctccggtgcgatgctctgcgcgagcttgtggtagatgccctcgtcctcctggagccgctcgagctcctcccgtgtcttctccgtcatctcgaggtcgttgtagctcttcttcatctggcggacgaactgagcctcaaggaaggtgtcctggagaaggccggccctcatcgcccggaggccagtgtacggcgtcgggaggaagacgcctgagatgtcgacgacgtcgccgggagagatcgtccgcgtcaacggaccgtagaggtggatcgtcatcgaccgggggatgtggccgacgggcacctggtcggcctgaggtagcatggtaaagcgagagatctatcgtcagccaggtcgagaccggcagcgcgagccagcggcaagctggcacgcaccatctcctgaatcttgacctcctggaacggcacaaacttgcttgcccgagtctgcatgatgagcgagccgctaacgcggtcctgccggcacgttgccgtcgggcactcctgcaacgggaggaagctgcgcgagttgatgacctggaaagtctcctcgccgcaggcctcgcacgagtagccattgacgaggacgtgcggcttgacgtccgacacccgggtcgtgatgccccggacggtgatgagcttgccgagctcggcgccgcggatctgccggaccgcgagcgggttccggtacgtcttgcggagcggcttgatgtacagctgactgcgaagttaaggtggcagagaggacatcaggttttgtctcagcggaaataggcgcagagctgctacgcactaccgcctcgtcagggtcggagggaacttgtcggcctcctcccgaccagcctcctcattccgccgccgccgctgctccatgatgatctcgccgacgtcgtcgctcgcggcgagatcgacagaaggctcgggtaggagcgagtcgacgacctcagcaaagaggtcgaggtaccgccggccattgcgcgagatgttggccgcgagcaagaagggcggatcctcgaactgaaaggcgagcgcgagggccgggaaggaaggggggcatcagtgccgagcgccgagcctcgatttgatcgaacggacgcaccgactgaacgtcgtcgagctcgatggtcagagccgtctgcttgcggttcgcaatgttttgctggaagagagcaaggcgaaggcagcgggtggccgcgaagagcaggggagggaccgaaacaggtgtcgtacatcagccgactgttgatcaacgcgaagcggatcgtaaggcgcgctggcaggtcgctgctgccagcagcatgagaggcaatgggacatgctaggacgtaccagcattcgcatgtacttgaagcgaccctggccctcgctggcgccgtcaaggtccatcgcgtcaagctcaaggccctcatcctcatcctcgtcctcgtcgtcgccattggcagcggcaccgcgggcagcctggtgggcacggggctccttgacaaactgggtgaggaaggaagatattttggctgtgagagggttgcaaggcaagaacgaaggaggcaggttgggcgaggacgcgacgggacggcgggagacacggcgggagacgaagggggagagtcagcctcgagccgaccatctgaacaccaagcacggttactgccttcgagctgctcgtgcgagctgctctgagcagctcaagaacaggctcgaggagccaatggtcgaggacgaacctttctcgccggcgtagtcgacgccggcgttgaagaccggcagcgtcggctggctttcgagcgcggcctgcatggcggatgaacgggcgggctagaaaagacgattgtgacgcgtctagaggcggatcctgagccggtcgatatgcgctacacagaagcaagcagagaggcggtaggttggacggagggagggaaaggtcggagggtcgtctcgtgctcgaggcgaaagtggccgccgcttcgcgagacgcgggcggcgcgcgcgccttctccgccaacaatcttgtctcgcgacgcgtcttggtgactcgcgaggcccgctcggcagcacacgactggacagacattcagagctgagcaggggcgtgtaagacagagaaatgaaggactgagaccggacggtggtgtgggcgtgtggaggggtatgcagagaagggctgcgggggggtcgtaatgcgcaagtcgctcatgaggcgaggtactcggccaagtcgaaccggcggtgctcgcggaagtactgtagagaggaggaagggtgcagggtcagattcagcagagaagaccagaaggtgtgaccatgctgcgttgctacgagagaagacgcaccctgccgagccgctcccactcgacaccgtcgaccgccgaccacggcggaactgggtcgacattgtggtggccgagacggtcccagacgaacgtcgcctgcctagcgaggacgtcgagagtcggcgcaccatagtggccggtgtgtactgtgtggcggcaacgacggggagagaagaggcgggcagagatgtgagcataataaggaggtggagcgccaggccagctcattgaaagagacgggcacacacagagcagagcagagttaacctgatcggccagcgcctcgcgccgaccaaaggcgaggtaggcgcgcgtctcgggatgctcggcttgttcgggcgggacgtaggcgagcagactggccgcgccaaagacctcctacaggtgagcggccggaaagatcggcgagatcagtgacagccacttgcaagcgaacgagcatgaggaagagagacgcacgctctggtaccattccttcgaagagccctcttgaagccggtcgatggccaagtgaagcgccttggcctgggcgagggcgctcgacgaggtggccgagacggtcgacgacgccgagtggatcgacgacgccggcgaggacatggccgtcagcgcaccgttccccgacggtggcagtgcaggagaagccgagcgacgaccgccgcccgagccggctggcgcaaaggccgttgctggcgggccgacggggacggtccggattgtctctacaaaggcctggatgagcaagttgaggtgcaggaatgacggccgggctgaaatgaagggcagcggccgagctaatcgtagcgggggagggtgcgaagcagccgtcgtcgccgtcgccattccgtcctgcttaggcgcggatgcttgcgcagacgctcctgggaaagagctgaaggtcggagctgtggcagtcgctgtcgggactggcttgctgaagggggacgacgtgtacgatccggccgcgtctggcgccggcccgtcctcgggcggcgtaaagaaggccgggaagaaactgttgatgagtgcggttgcatgctgaatattgccctggagtatctcggttcgaattactgtcgagtcgaaggagccgaaaagagtcgcaaagcgagagggcaagtctgtcagccggcgaacgatgcagagacgtagtgggaagagacccacgaccacgctgctcgaccgcatcaagctcggccgtcgatagcacgcccgcatagagactgttgacgctcgcaaaccctcctccgccagggctcttgccgttaatctggagcgacgggttgagtcggatgccgagcggccgattgcgacttgtgctcgtctcgggcccattggcctcactgtcgccgtagccgaaactgttcgtcgcggcctcgccattcgaatggcgagagccaaagccgttggtagccagctttgcagacggccgacgactggaggcaccgctctggctgccgtcagagtcaaccgccatcccgtcgttgccggcctcctgctcccgcgcagcagccgccgctaccggacgcccgctggcagggaggacgaccgagtcgctcatcatctggacgtcgtactcgccctcatccgccgcagacgtgtggccggcgccgttcgtatgcaaagacggcggcatgtgcgccgtcgaggatggaccagcctggtcggaggcggccgtttggcctgtggccgacgccaccgcttgcgatggcgagcccgccggctgcttggagagggcccgggcggtcgagaggaagcagtgatggctgaggtagtcgagcacgatccgtttctacaagatcgtccgcagcacagaggtcagtagcgatctccatggcagggtctgagacgggcggcacgacgtcgtctggtcggtcggttgctgggtcgccctcggcgcatgcgggcgcgggacggatcagtcgacttgactcgagcagctcttcctcccgcgacgacttgatgcgcatccctccgatccacgaatagagacaagctgcctctgctagagctggcggatacgtcagagtagaaggagaaagggactgacgacgtcgtcggcctcgggctcccgcagcgtcggcccgcctggcttcctgccagccttgccacccgtcttgccggctgtgccgccgtgaccggtcttcgccagcttctccatgctcgagggaaaggtcgaagagttgcgggagagagcgttagagacttgcgagatatcagagagccttggattagaggatgattcgaaggcgaaaggtgcgatggtcgtgcgaggtgagaggcggccgcggaacccggggcgacttcccggtgcaggcggcaacgccccgccggcgtgcgtacttatcctttcgaactgctcgatcttatgctgaggcgacagacacgttgacaggaagtgcatggtgatgcagggtgagatccaagcgcgcaaacagagttctacagacggtcgtgctttcgttgaagggtggggaaggtgccgacatccagccggcacaggattacatcgcttagactttgcgcatgttggtgaggtagtacctaagaagttgcgtcggaacgtcagccagtcgtgcctgatcgaggggcgcatggtctgcgtctgatgtgagagggaaagagggggcataccagaagccctgggcggcgacctcgcccttggccttctcaaacgtctggccagctgccttaccgtgcgcccagatctgaagaggggggagagaggtaagtgactgcccacgacacgatgatagaagggtgatggggggggggggcacgcacctggcggtagaagaagacgcttgcaaagaactgaagcagccagccgagcgagctcagcaagcacaggacggccgccgcccagtggcggccgatgaacatgcggatcatgttcatgagtccggccgagcccgtgctcgggatgccgaagcacatgtagagctgtcgcagtagcgtgggaacaggtgccgtcagcagtccatctggatgacgcggggcgcgagcaagtacgatagagcagagaacctacggagaagaggatgtggaagccagcaaagacgtaatagacgtagaggaagatggcgacctccttggcgaagccgtagtaggccggccggtaccagagaaggaagctagggtagggttcggcgcaaggggtgcccggtcagctcggctggctcggcagagcacgaggaaggtccggcaaatggagcgcaacgcacgccgggacagcgatgaatggcacgtagacagcggcgccaatcatgtccttcccaccgtcctgctcgccggagacgagtaggaggacgcaagcgacgaggttgaggacgagcgtcgctgagagcgcgagccagagctgatagagtcgggtcacgagcgcctgagacggctcgggaatcgacgaggcgatgtcgtggtggatgaccgggtagactggaggaggagcgacacatcggcgccaggcgtggggaaagggtgcacggaaagggtatagtcagcgacgggttttttgcctcagcctcgatgggcgatgccctcctgccgcatacacgcctccagaagcagcagaaggacgaggatgtctccccacgtcttccggtgcgaagacgagcaaggctgagcagccgcagatggcgcggctgactctggccggcaaggtcggtcgagtcaggctcgaaagccttcagctcgctcgcgcggcgccaagtagagctgcgcgtctctccatgtccgacggcgtctacattgagccgcgcccccgcttgcgcgcccggctcgcctcgtctcccccttgggtgccgcctagagcgaacgcggagcagatagaacgtacacggcggccagttgttcggcttgagaccctcgaccgcccgctccctcctagcaagctcctcctcgcgcctcgagagggccgcctcgcggtcggcgagcgcgctcccggcaggcggagccgtcgtcgactggacggtgtaggtgctcgcgccgtcgtcgaacgggtttggctgctggtcagcgaacgggttgtcggaggctgaaggcgtccaagggggggaggccggcatcggtgtcgtgcgcggcagggcgattgaggagaaggcggacgagcgacccgggatggcaatagtggaggcggaggccgtcacgaagggtcgcagacgtcgcgtcggaagggtgattgagaggcagaggtggaccgagagagaggaagagcagccacgcgcgtcgtcgccagatggtcaggagacgcgttccacgagtgatgagccgagcgggcgggcggtaagagggttgggttgagtgcgtcagctcggggtcgtcgggagcacaagtgagggggcgacggacaagtataggctgcggcacgggagcaagggcgttgagcgagcagcaaaggccggaccggcggcagcgacagagtcagtgaccaaccaagatcggacagcaggctgcgcaggcgcagtgagagcgcgcacccatcgtgaccgaagttgttgaggaaggagtggctgcaagcgagagatggcggtcgccggcgaaggcggtgagcttcggccgggggcgagaccgtggggctgcgcttgccccgatcgggctcttgttttggactgcttgggatacttcggggatatcgccttcgccgtctcacagtgccttccgcctctgtagtcgacagaactacaagcagatcgcaggaagcaatgattacgcaatgcaaggtatccgggagggagtgggtcgatgcgtggtgagagggtaccctgaaatcgatttgagggtaccctgcgctgtgcatcaatctggaggccctccctgccagtctcccagattctgggccagaagcccggatgatgggctgccagccgcgcgggcgccctcaaaggccgcgttgttctggcggcgtcactccgctcctcaaccctcgaccctctccattccaacgaccctcttctcggccgctcctcccgtctcgctttgatagccgacgaccccactctcttgtgcgcctcttttcttcccagccgcccgggccgcagcgacgccggccagcaggcaggcaggcaggcagtgaaaagccgtcgcctgccagaccgagcgctcttcttctccctcatcccttgctgatccccttcctctctctcttcgccgtcttttccttgctcggttgctctcttcttgtctcctcgacagtactcaccaccaccacacccaccaacgtgagtcgacctggcgctgaaggcagctccacgtcatgccttgtccgaacggttgactgacagcccgctcgcccccctcctcgcagtccaatctccctctctaactctctcctctcactctcttcaagatgctcgccttcgcctctgtcgctgtccttgccctctcggtcgtctcggccgcccctgccgccgagccaacgacgacctcgtgggccgccgaaccgaccaaggccgccaaggtcgccgccgctgtcgagaccaccacctgggaggctcccgcccccgagccgactcccgctgccccttcgggcggtgccgtccagtcggacgcccacgccacctacttcatgcagaacgggaacgccggcgcctgcggcaacgtcaactccgagtcgtcgcacgtcgtcgccatcccctacaagtggtggggaggtaactctggccaggcctcggaccgctgcggccagacaatcgacattacccgtgtctcgaccggcgccaaggtcaccgtcaccgtcgccgacctctgcccgacctgcacgaccgacaactcgctcgacctctcgcagggcgctttcggcgccatcgcgtccgagtctgagggccaggtcgacatcacgtgcgttttcaccggctcattctgttttcagtcaatcagagactgaccttcccctcccttcccttctgcagctggtcgtggaactaagcgcttgcgcctttcctcttctgttccgggctctcgcttcttcaaccctgcaatctagcagccgacgatccttcatctcattgcatctcaaacttctttgctcgctcgaggccggacctcgacacatcaaccccttcaccgacggcggactcgcccgggaacctagccagctgcgctcgctgctcccttccgtccgtccttcgggacctctcccaggctgcgcctagaggctcgcctcccccggtcgtttggcctccttccgccctcgtcatgcccctaggcctagcgccaggcccatgccgttggtcgtcggacttcaacccttcaggtcgccgacgcctcaaagcagcacgtcctcgcacgccccacttcgccccccttccatctcgcacgcttttccgggcaggatcccggccgagccgcttcccagaccgacatacgtagagccgtccctggtggatctcgcggcagcgcgcatcgccgcgctccgctggctaaaattgagtcgaggatccgggcatcggctgtgagcgacgtacaaaaaagaggcctggtgtctcctccgccagctcttgcgcctcttgccccccccccctcatcaaagtctcaacccctttgccatgaatgctcccttttcttgcacctttgtctgaccgtctcaagcttcaagaccatccaggacccgaaagacaccgtccgcatgagctgcggctcactcggcctctttgccactgcgcacctgtcagctcgacgccctcctctgccgcgagcgtcgcaacggcatcaagataggggccagaggaaacgagaaagcccgtccttcagcgcattgacgggcggtcgacaggcgacgactcgaatggcgaccagaggtcgtctgccgagacctgcgcatgcgcacgagaaggagcggtcagtcgccgagcatcgtccttgatgatcaggtgggcgagtcgcaccttgtcctcgtagggctcctgccaggtgaaaagacgacgggcgtgcagcgttagcgagcgacttccggccttcagcggccatcgcaaataatggcaagtcgcaagtgcggacgcacctcgacggtttcgctcatcgtcatgccagcgaagctctgcgccgtcctatcggctgcccgaaaggcgtctccagatgaggatgcttttctcggcgattgttgccgtcgactactggcagtgctgctctgcttgtcggcacgactgctggaggtcggcgcagtcgggtaggcctcgtagcgcaagccaagcgtagacgccgcgccgcgcgttactccgccgacagctgcgacgttcgatgacctgctagggccgtcgcttttgggcgtctcgagctcaggcaaggttcgggcgtatgctgtgaggctttgcagaacggccggcagctggatcgagcaggcatttccgcagcgtcagccaccgtctcgaccagcttacgagcgtcacagatggctcaccgagaggtccgtcagaagcggcttcagcccaacccaaccgtccggcaacgctgcgacgcgcaagaaagcgtcgcacttctgcaggccgtgaagtcaaacgaagttagtttggaaggctatgtcgcttcgtgacgaggacgcactcctcgaaggtgccttgtcgcctgtgcgcgtagcgcagtgatcgcttcaagtgcctcctttggcgtctgaccgtcaccgagcgtcgcgcagaggccggcgagcgagacgagcgatgcctgctggagcgtcgctgttcgaagggcaatagtaaggcgtcagcgctgcgtccgatgagaggcacagctgagagacgaggcgcacctgagttgtggttccgcaggaagctcaccaatacgcggcaggcgtctccgatcggcagcagggcctttgcgccgaaaaggcagaagacagcgcaggccagcaaagccagtgtgggtgaggaaccggtaacgggcacgagagcgatgtccaggagcgtttgggtgaaggagtcctgatcattgctggcagctgtcgaaaaacagcgtcaattagtcacacagcggtcctatcatgactttgaaaacctctcgcgcaccatcaccgagccattccaggacgctctgaatgaaatgctcgaggacagctgatgtcttgaacgcggttgtgatgcgatgcacgcttgaggcgaacgtctcgcctcggcgaggagatgagatcgctgcggcggtgagagtaaaaacttcgacggcgcgaacagcgagcccatcgacgccgtctttggcttcggcgagcgcttcgatgagtcggtcgaggtggaccgtaggtagctcggctgagaggcgacccagaatgcgcagcgcctgaaggggtgacagtccgcgtcagcataggcaaaggcgagccgcaggaacaagctgaccggcgcaccattttgcggatggcagcgtcctcgctctgaagctcagaggtgatccgctccatgacgggccgctcaccgaggatctgacctccctcctcgatcgacagcgcctcgagcgatcgtagggcgaagtaggtgtcgttaaggtcgtccgaaaggctggcagcccgaatgatccggactaccagaggctgtacgacagaccagaaggccggctggagagcctgttggtttcttgccaagagaaggaccagagcttgggacgagtaacgagggggtcagaatccagagcgcagttcgggctggctgacgacgggactaaccttgttccttgacagttttcccatccgcagcctggagagcagatctgaccgctgcgccagcatcgacatctctgagtgagtaagtcaagcggtgttagccctggagaccccaatgcctgtctctacctgtcgctcgaagcgacgcactgcagcttttcgaccgcgccgaagtcaacagtcgtcttgatcacttcgtagaccagtagcgaggcgtcgctttgagacctaatcgtcgtgccggctatgttgagttcatcgagggctttaagaagggctcgtgttgtcgtagctttgtcgacgaagccgtgctgcaggtcgacgagtcaaagcacaggttcaggtgagcaacaggacgactctgcgcgacgaggacgcaagcacctcagtcatctttcgcagcaccttcaccgcctggagtgcgaccgaggggttgttgtcctgcagtcgcttccagatcttgcgctcgcacaggccctcaagcgcatccggcgctggacccgagagcgcccccagggcagcaagggcgaggcgtcgaatagcagccctgaaagaagagcgctgtcaacagtcaagttccgtccggatcctaagcgagcgacgcacgacttgtgagagacgagatggaggacccgccgctggacggccggggcgaggtcggcggagggagcatgaacgaccgcgcgcagcgcatgaaccgtcgcgccgacgctggacgagctcaggtcctgtgaaggacgtcgtgtaacacgatcagcagctgagcgggagtaagcgctaagcgaccttatggacgaaccttgacgatgctgttgaagtgaagaagcgacaggtcgttctctggccggaggttgagcccgaggtagaggtagcctgcggagcggtcgatgcatcagcatcagttgcctcctgttggcgactgccccaatgcgcacccagactcctgctcttgagcgtcccgcctccttcagcgaggttgagggcgtggacgagggcaaagtcgacctcggcaggcacgacagacgtcgtccggtggttctcgaggaagaggaggagcacgagcgcctcggtgatgtcgaactaggagcaggaggcgacacagctcatcagccaaggcgttcttccaccgtcgagcagccagcctgtcagcccgaactgacgtccttgacccggcccttgcccttgacgagccgctgtcggatccggtcgagctcgcgtcggcagacggcgtcgacctcggccaccgacgtcgcgctctcgatctgcgagataacggcgtgatggctcgtcgatagggccgacgagaggagatagttggtgatcatccgctgcagtgtgtgaggcaagggccgcagggagatgagcaggtcggcgttgggtcgaccatctcgacggcccccttggcaggcggcgacggcgctccccggccggcaacaacgtcaccggtcgacgtcgacctcccttcctgcacgccatcctccccttcgtctctctgcctcgctcgctgccgatggacgccccgctactcgatccagagctcgaccggatgaaggccagccttgtccggcacacggccacccagtgcgcccgctcgctcggctcgggatagctgcactgcgcctccgaccgcccaaagtcactgacgtcgcacccgctctgtttcctcgctgccccgtcgtccagaggcgcccagctcgcgtcgctgctcgctccgccgctctactttgcgaacgcggtccggacaaaacagtggtcctttaacgggctgctgcgagcgacagcgctcgccgtcatcgtcgccggcccgccgaccggcgcgctcgtcgctcagctccagatgaggtcgtaccggacgaaagaggaggttatggctcgggtccacgcgctggcgctcgacgtacgtcttgagagcgctcgttatggctggctactgtactgacgctggcttccgtctgtcttgctcgacaccagtcgtcccagacgcagctcaaggactactcggtcatcggcgccgtcgttggcgccctcttcacacccgttcgtctttcttccctcttgatctgttcaaaatgttactgacgcccccctctttctgatgcgcttgcaggccatcttcttgcgctcggctcggctaccttggctaatcgccggcggcgcaggcctcggagttggtgcaggcgtcctgacgtgagtgacctgctgaggaccgtcgacttctacggcgcagacgggcaaaatcctgacgtcctcgctcgcattcactctcagtcactatgcgacgtcttactcggctcagcgggcagtcgatgccgccaagcgcatctagtcttcgaccttccagcgacttcttctttcaacgacgactgcctccggttgtgcctgcaacttatcccagtcgaccctcgccccttctgccgcataactgctcgcctatcttcccgagccatcgcgtcggcgtagcttgtatcgataccatgtcctgctcctgtaaagcgtcgccgagcggccagcactggacggtcaagttgggcagaatggattcggcacgacatcagctctgccctcgtcgccgcaaacttgatccaacggcgcaatgcgttccaacgacgggtgcctacaatagataacaccctccactcttgacctgactcgccctcgggtcgtagactacatgtggtcttcggcgtaagtcacgactgttgcgcagcgtcgtcaccaggctgctgccgctccgttgtccgtcttccgctgcttccgctgctctaaaagctgctccaaggcatcttacggcttgtcgatggcgtccccgcctgtcgttcccctcgagtctctcagatggttggcgcttgatgaggttggccgaaaagcagttcggaagatcagcggccgcctcgtcgccaataacgtctaaggttcgcgtgctcgatggctcagcagagtcggccgctcggcagtctatgtcagtccaggttaaccgtttgcgcgctcgacgcaggaaaggcccatcagccctgcaaaaggtcagcaattggtgcttcagcgcttcgcctcttccgacaggtcaactgagggccaagtcgaccaacgcatctgccagcggtcgccagcaccgttgtacgctgccaggtcgcgatcagcgtcagtggtccgtccctcctgcttgcactgccctgctgcctcaaggtacacgatgctccctggtcagcggcgcactcgtttgatcagctttcgacccggcgcctctggtctcgcacatcgtgtcggcctcgacgcaccctccagctgccaccgggcaacatgggcactggccatcgtgcatcgacgtctgtcacgtcccgatcctccgtcgtcctcaaccccgtccgtccctcaggcggctcgttcgtccgcaaggaaggtgccccatcgtcgtcgacaacgcccccgggccacgcgattctacgcgccccgccgacgaccttgtttcgcgcctgctggccatttaaaaggtctcggccatggagaggtatggcgtgctggcctcgagcgctttgtcctaagaggacggcaggtttcgctattggcgttcgaggaagggcggtcggcggggcagcgtcgacggcacggccgaagaggtcgactttcgctcgaggacggccgacccggcgcctcttcggcaagacggctgctcgctcacccggagaccggtcgcgggtcccccctcttggtcgtcgctgatgaaggtcgtcgtcgtcgtcctaggcgcagctgacgaagggcctctacccgcctgccgctgccgagccgtctgctggccacctttctcgaaactctcactccatctctcgcttctcaacctcggtcttcgcagttggccggcgggccaggtcgactgggaggtgctgctgacctttggagcgagcggcgctgacgtcccctgggctgaccgacgacgttaagcggcgggtttactcccttggcgcgaccccgcggcagagagcagccgtctttctcaatccccgccttttggttcgctcgtcgatgattgcgataaacagccgtggctgcatgaaccgcatggcgccctttcggtcccccaggatcaactgccgggccctctgccaagataccgggcgagcgcgaacatcgtatagctagccgggtgagctgctagaccgtccgttttctctctctcttgcagacttcctttgcacccttccttcccctccttagcggtcgaagaccccacgatgggtgagctcgaaagcttcggggccgaggctgttcgacgtctcgagcagacgacctgacgctcgatcgccccttattcctcgcttcccctccggcagcgactcccaacatcattgccgactacgaggtctctggccaggacggccggggcgtgatggctcccgtgcacccaatgacgctcgcgcctgccgacgaccacgatgtcaaggacatgaagatcgacgtcaacgcgcacgttgaggaggaggatgacgacgacacgcaggagggcgagaagccgaccgaggaggaacgctcttccctgaggtaagctgaccgcccttgatctttcggtctggcatcgccgagctgacctgccgaccgtccctgatcgtaggctcgtcgctggcacggttcccctgacggcctacgtgatctgcctcgtcgagtttgccgagcgggcttcctactacgggtccgtctttgagaagctcctccgagccctccctccctcgtcgtcagtagctgacctctcttttctcaacagttgccaaggtatcttcaacaatttcatccagtgcgtttccgtgtcgtgctcctcattcgtgcgcttcccggctaacccatttctgtcctcgcaggcgcccgctccctaaaggcagcaccggcggcgagacgctgcccggctcgcaggacacccctggtgccctcggcctgggcctgcaggcgtcgaccggcatcaccaagaccttcgtgagttgacttgtctccgcctcgcctgaggctcgtgaacagcgctaaccgccgcctccgcccactgcttccgtagaccttccttgcctgttcgtttcttcttcccctgcacctacaaaaagtaatgcgctgacccgactcttccgccgcttgcagacttcctgcccatcatcggtggcatcgtcgccgacaccaagtggggtcgcttcaagaccatttgcgtcggaaccgctattggtgttatcgcccacgtcctgctcgtcatcgccgcccttcctgtgagtgccggtccctcttgcgtacctgcatgaagggtgaggacactgactctgcgcttctcgcaggccgttatcgccacaggcaaggcagttgtgccattcgtgatctcgattttggtcctagctggtgcaaccggctttatcaagccatgcattgcgcccatcatcgccgaccaatcgcagatccgccaccagcgggttatcacgcttccctcgggcgagcgcgtcattgtcgacccctcgacgacggtcgccaccctgctcgcctggtactactggtcggtcaacattggcgccgtctttcagattgcgacctcgtactgcgccaaactcgtcggctactggctcgcctggctcgttcccgtgagcatgctctagtatccagtctcgtcgacgtctgctgacctctcgccttgcgtctctccttcgcagggcatcatctacatgctcatgccgatctgcctctggtgggtgcgcaagcgcctaatccttgtcgccccgcagggctccgtcgtcctcgatgcctgcaagggtacgccgcagactccctgtttccggaatttgacgcgggaaaacggcggctgaccttgcttggccgtcgcgcaccagtcaccaagatgtcattcaccaagggtggtgtcaagcacttcctcaagggcgaccaggagaagctttgggagaaggttcgtccttcgcttctcttaaccctttcgctttgacgcttatgccatgttcaatccttcccgttccgaatgacagacgaagccctccaagatggccgagtacggtatcaccccgaaaaaacccgttctctgggacgacgactttgtcgacgagctcaagcgcaccgtcaaggcctgcaagctcttcctcttcttcccggtttgtcacgccctacactcccccctccgctgctcctagctgacctaccctctcggctgctttcagatcttcctcatggccgatggcggcatcgacaccatgatcggctcgcagggcggctcgatgatcacgaacggtgcgtgctgcccgcttctcgaccagcagaggggctccctgtctgaacccttctttcaaaacgctccctctcttgctaggtgccccgaacgaccttctacagaacttcaactcgatcactatcatctttgctgtccctctgctcaacgtcgtcatctacccgtgagtcaatcctcttccagaagcccgtccaagttttgttgctaatctgcctcatgtcctctttcagttggctccggaagatgcgcatcaacttcactccgatccggcgtattctcttcggcttcttcctctgcgttctgcagatggtcatctgcgccatcctgcagtggcggttcgtcctctttctcgctcgttctgccggttcgaggagcctcgtcgctgacctcctggcgacttcctctctcacagggtctacaagacgtctccctgcggctactacgccaccgagtgtctcgatgccgagggaaacgcgctcgtctcaacgtgcgttgctcgccttctatcgtcggctcgcagtcgcttgagtctcgcatctgactcgccatttcttcatcgcaggctgtcgatttggacccagatccccctctacgtccttccggctcttgccgaggtcttcatcaacatcacctcttacgagattgtcagttcctccgttgcactttccgccttgcgcaagacgctagcggagttcgcttcaaccgtctggtcgctgacccgccccttcttcacttatccaggcgatcactcgtgccccgcagcgcatgaagggcctcgtctttgccatcgtcctctcgatgagctcgctgagctcggccctggcgctcatcatcacgcccgccttcaaggacccgcacctgcactggatccccgtcgccgtcggcatcgccaacctcatcgccatgggcttcatctgggtctacttccgccacatggacaacgagaccgagctcctggagattgtgcgtatttctagcctttgacaggtcacccagccggtcaatttgctgaccccgcgctcctcacctcttctcgcacagggtgtcgaccgcgagctcgactttcaggacaacggcgctgcgccgcccgactacgagcagcagaagcggaaccagaccaaggtcacggcctaaacattcggacgctttgctccctctcctgtgctcgcgcggtctctctcccgctgtgtcattgcctgctttacttgtatcagctcgatcaagtcgatcgactctcttctctctctcgcactctccttgcgacgatctctgctcttcttcacacattcagacgggttttgatccatgagcgatgctcttcattgatctcctcgaaaactctaaggctgcctcgggacgtcctgccagctgccgctgcctccagagccgccgctgctgccatcgccggtcggcgctgccgtctcacgaggctccgtctcgacattgtactcgccctcgtcgtaggccgcggctgccgacgtcgaaggccgaggcgagtggtcgtcatcgtcgaggaaggagctatgcaccgcgcacagagatgtcgtcagaagctgggtcgacaagcagagatggacggccactcactcgtgatactcgagccctcgacggtcgtcgccgccgtcaaagtcgttttccgagtcagtgccgtcgccgaaagcgtcgtaaagctcggacgctttggcgccgtcgcgctggcgcttgccccggccgaggatgcccatgctgaggccctcgtcgccgccgccgccgccgaggacgccgtactggccgcgctcatcgccggcgccgaagctgccgcgccgacggcggttgcgaaggaagaagaaagccgtgcccgacaggccggcgagggcgatgaagccgagcgcgccgtacacccaggtcgatgactggagccgctcgatgccgtcaaacgtgccctcgtcgggcgtcgcctgggagccgatcgggtccgcagctgtgatggcgtcggtcggcaataccggatcggcgagtcccggtttggcagagaggccaggcgcggcagcgtggtctgacggcaggttcgcggtcggctttggcaggaccttggttgcggcctcggtcgtcgccgtcggctcggttgcaggcttcgtggaggttgcagtgtcagagtcctcctcgccatcgccagtctcctcaccctcatcggtgacgggcagcgagtagggcacagccttcgactcgtcgatggcctcgccccagagctggagcgaccaggcctggaaggtgccattcttgagcgggttgacccggtcaatgaccttgagcgtccagtcgccgaccgggtcctcctccctgtccatccgagcagcaggtagcttggtcagcgccggccgagcgagtaaacgagcgagaggatgatcgagcgcaccagtgcttcatgctcatgaacttccaaccgcggaagccggtcgtggcctcgtcgcttcgccgagtacgagcgaggacgctgatgacgcccttcgggctcgtaagctcgacctcgacatcgccccggcgagcatggtcgacccaaagctggactgtgacgtgctcgagccgctcgaggttggccgccttgagcgcgtcggccgtgacgctgtacgcatgcgagacgccctcggacgtgatgaactggccggcgccatcctcgggtgtgacaaccgactggatgtcagactcgatccaggcttgcggcttgacgagcttccagctctgggccagctcgacaaacttgccggcattcagcttgccgtagccgtctgtcacaggttgaatgaaggagggctggctgatcagacccatagcgcaagtacatcaggcgaggcaagagcagcagacgcacacttatagttgaacttgcggccggcagctgtcgtctcccagtcaggatccacgtcattgaaggtgtcgacgccgcggaccatgaggtgctggacgtcgcgccatgcgaggtcaggcctgcaataggaaggcgatgtttcaagtcagaaggcgcgacccttaatgaccagtcgagaccgcagctgcaccgacgtaccggacctgaagagcgagcgcaaccatgccgacagcgagcggtgcggccgccgaagtgccaccgtggccgtcgctgcacttgttctcgccgacgtcggtcgtgtgctgccgggcaggaaggcagatcagcttaggctgttcgggtggccagagcaaggaggcgaggggctcacgatgtggtcgccggaacccgagctcggagcgacggcaaggacggcagcacaagcctccgagtagtacgggtggaggcccttgcggtcgacggcaccgatagtgatcgagtagatcgagttggtgtagccgtcaaagttgcactggtcgtccatccctccgccattgccggccgcaaagacaaagacgctgcccttgccgtcccgaccgttcatcgcgccgttcaccatcgccttgaggatcaggccctcgggcgcgtccatctcgcggccgttgtcgggcgggccccacgagcacgagtagatctggttcgtctggtagccaaaattgagcgcggccgcctcgtcggcatccgagatgggacccgagagaatccggatgccagcgaccgacgaggcataggcgacgccgacgccgcagacgtcgttgcggacagcggcaatctcgccggcgcagcgcgtgccgtgcgtgtcgtccgagagcttgggcgtcggcagcggctcgtggtcgttgaagtcgtacgaaccctcggcatactttgggacaggcactgcaagtcagcattcagttcagggccgagctggctcagttgacgcacaaagttgtccttgaggtcgagcgacgtgtagtcgaggccgtcgtcgatgagcgcgactcggacgccctggccagtgatgccctgctcccaaagcttcgagacgttcatttcgttctgcggcatgtcggtgttgacgagatgccactgtctgttgagaagcgggtcggcgatggcgagggtcgaacgctgcggatgtgagcgaggcgcggtcgggcgaggcgcggttggacgaagcgtcagccagtgagccagccagccggcagacgaagcagggcagaggagacgacgcaccatgaagtcaagctcggccatgttggcttcgggcagcgtgctgtcgccatcctcctgccgggctccaatcgtcgactcgcctcggagggcgaagcggtcatgctgcggcggctcgatccactctctcttcatccgcttcctgagctgcatgagctcgagcccgcgaacagcttcgacctcggccgaccgtttgcggagcgcccgccaggagcgcttcatgccagcctcaccgccgcgcctgtcgtggtcggcatgggcgagccgggcgaggtagtgatgcgcgagctcgcccagcggctcgacgagctcgaggcccagataggcggcggcgtcgctagccgagccggcggcggccgggtgcagctcgacggcatagtacgaatgcgtatcgtacgttcgaggagcgggatgcttcggaaggatgctagtcgtgtgctcgctgctgaccgtggccgtatgcagagaaggcaggagggcgagtagcaggagggaggggagggtgaacatggctcggagaggcgcggcgcgtccggcgagagagggccgccagcgtcgggaggcgagggggcgggaaggagacgaggttgagagggtcgctctagggcaggcgcatgaagtagatcaaacgggccggctgcttgtctgggtcgaaggtggacgtcgagagcagctgcctagatggccggcttcgcttccgtcgctcgtgccgcgcttctcgtcgcagcagcagctcagctcagtacggccgacctcgaaccggtcacccgtcctcgctgccactcactcgacgccctcctaggccactgccgaggacgctccgtgatcgccatcccttcttgactgcatggcgtccgaagccccctcgctcgaggcggccaagcgcccgccgacgttccctcaggcactggtcgtacgtccttcgccgcgagctcctcgccgcctgcccctgtgctgatgagttcgatctcctctgactcagggcggcgcccttgccggcctgtcggtcgacctccttttcttcccgatcgacacgctcaagacgcgactccagtcgcaggccggcttcatccaagccggcggcttcagcggtgtctacaaaggcatcggcagcgtcttcgtcggcggcgcgcccggtggtgcgtctcttgcccgtcccgacacgcacgcaaccgtcatccgttgctgatcgggcagcccatcgctcctcatagccgccgccttctttacgacgtacgagacgctcaagacgcgcctggcagcctcgtcgctcaacctttcgactccttggatccacgtcctctcggcttctggcggcgagctcgcggcctgcctgatccgcgtcccaaccgaggtcatcaagacgcgcgcccagacgagcgcgtacggcgtctcgtcggccggtagctggaacgcggccaagcgggtctggctcgagggcggcctccgaggctgctaccgcggcttcggcatgaccgtctcgcgcgaggtacattgcccggcatgtgcaagcggggtcaggattgccgaggctgatgagtcgcgctccctgtttccttttacaagctgcccttcacgagcatccagttcccgctgtacgagcacttcaagctcgtcctcgcgcggccggcctacctcgaccgtaaggcactcccgcacgaggcagccatctgcggctcgatcgcgggcgccatcgctgcggcctcgacaacgccgctagacgtcatcaagacgcgggtcatgctcgaggtgcgtcccaccggctgaccctgttccatcgcggacattgagcgctcgaactgacttgaccctggccacgcgaccccgcgcagaccaagggacagtcgacgacggcctcgcgcttcggctcgtccttcctttcgatcccagcccgcatgtcagagattgctcggaccgagggtcccaaggcgctcttctcgggcgtcgtccctcggacgatgtggatctcgctcggcggcgctgtgttcctcggcatgtacgaggcggcctgcacgagccttgacggcgtcctttgagggccgcgagaggactcaacgcatcaaggagataggcactcacctagcaacgaaggcggaggccgctaactgctgttgccgacgccgttgtacgaccgtgcacgacatgccggcgccgaggagggagggcaatcggtgaccgcgcagccatactgcgacggtgccgcgacttcccgactgccgctccaagtcgcgcccacatagagacgagcttgccctatagatcaagacctttatgaaactcctgcccgcgttctcgtcagtgctggttggccggatcgacgtcctgcgtgcacgccaagagcggcgctgctgccgcctggtgcgcccgctggcagacgcgcgagcttcgacccgcccagcgaacaacccggtgacctccatcttcttcccctcgccctccagctttctcgcgtcctctcttcagcagtaaagacacgctagaccgaggcagatctctcagtaccgtcggcctatccgtcgctcgctcgccctcgagctcttccttcggctacgctccgccaacgagcacgcagccctcccgcctccttcgcaacgatgcgactcctccctctcctcctgctcggccctctggcagccaacgcgctccacttctacctcgacaagaccgagaagaagtgcttccttgaggagctgccagtcaacacgatggtcgagggtgcgtcctcttggctgcccttttgtcgtctggcggccgcgtgagctgcctcgcgcgcaagggacggaacgctgacgggagtcgagcctcctctctgcgcaggccattactcggcattcgagtggtcggacgacaatcaggacttcatggtcaaccctgagctcggcatccaggtgacggtctcggtacgtccgctccagctcgcgtttcgtccaccggggccagctcaaagggagccggcctcgccgcgggaggcaggcggcccatcgcctgcttcgattgcgccagtcggctgccgcactacgcgggacctagctgacttgagtctgcttgcgtttgcaggagggcgagtccaaccacctcgtcgtcaacacccgcggcaagtcagacggccgcttcaccttcacgtcacacgaggcgtgcgtctgctggctgcgcctccctcctctcccagcccagaccgctaatgacctgctccttgtctacgacggtagtggagaccacgaaatctgcctccaaaccaacagcactggctcgtggttccaaggctcacatgtcaagatgtgagtctttgaagcagccgccggcttgcgacctcgcttggctcgagcactgacctcaatcctccttctcgcgtcctgcaggtaccttgatctggctgtcggcagcgtaaagcatgacgcagagtgcgtagctgaccggccctgcagctcatttagtggagcgcttcactgacgagcttcatctgcgcttcctcaggggcgaccgcgagcacttgtccgacctcgcatcaaagattgccgatctcaacaagaaggtggccgacatccgtcgcgagcagcagttccagcgggaggtgcgtcgtccaaggctttcacagaagaattccctccggagcgagtagctgacctccttttgctgcccttccgcatcgacctcaggccgaggccatcttccgcgatatgtccgagaagaccaactcgcgggccatctggtggagtctggtccagatcatcgtcatcgtctcggcctgcgtatggcagaccaagacgctgagagtacgtcacgaccgatgctgccgaccggacgcagtcaaagtgccgcaggctgacccgcttcttgcctgccgccttccagcgctttttctcagaaaagcgccttcgatagcatctgaccaccccttcctcggtggccaaggttgctcgctgcttgcactcctgtaccgctcgatcaacgaaacaccgggcgatctcatgcgcttcgaaagacactctcagaagaagctcaaagttacatgccaagctcaggcgccggggtctagccgcagaggacatctgggttcaggaaggggccagccaggtcgcgtccgattcgaagtcaagaggcatgacagggtcggcaccagcgcgcgcgtctccacctcgccgccgcaccgcctgagcctgcctcgagtcctggtcgtccacagcccttcaccttcctgtggcctgcgctactcttacattttgatgccgccctggctgcggcctgccgccctcttctggtctgccgtcggtgaccccgccgtcggcgacgcgtcgacgtgggctatttcgaggcgcagcaaacgcccgttttggctcgctgctttctctccctgccgccttcttctaccctcccctccttctctcacacccagcctctctcatctttcctcacactcccagtccttcctagctgcagcgcgcgttcctctgtctccctccaacgtcttccagccgtgagttgtatcgggcacgccgtcctcggccttctccgaagagagagctgacagcacctcttcgcgtcccttcacgtcccatcattgcctttctgtcctaccttgccgccctctcccgcagatgtccctctttgcctctgcagccgtcctcctgccgctcctgtcggcccttgcgacctcagtcaccgctcaggacccctcgccgaccgcctctggtgtcatctcgaccggcaccaacggtatgtccacaatcctgacttgatcgttcaaatcgttgagatctgagcaggtcgcagcggcgtgctgacggtccggcatcgtcccctccgtcgacaggcgtgaccaacccggcggcacctgctctcggcccgtacaatcagacgggagactctcggcttataacggttaactcctacgacgactggtgcattttcgcgccggaggtcccgggcgacacgatcggcgatcaggaggagcgtgttgtcagctactgcaccaagtgagcgtcgtgcagcagccagtcgaccggttgcggtgccggattgctgaactcttttacctctccaggccccggaacggcgcccgtgtcatcccggacggcgccatctcggccgtccactttgtcaagacgcccctttacgtccaagtctcgggctttggcgacctgtaactcaccctttccccagtgactccctcgttgcgtgcgggcgctcaacctcttgctttcttcaggaccaagatcaacatccaggccggtgacgagggcggtgagctggacccgcatggtgcgacgggtgctggcaacccagtcggcggtaacatgagtcgtggctcgtcgggcatcagtgccgtctctcagtcgctgatgtccttccctccccccaccccgtaaggtcaccaacgaccgcaccggctcggacctcttctacgaagagtggatgaattacgtagcctacgactcgttctgcatccggtgcgttttgttgactgccggtcttaccggccctctcccgctgaccttttagccttcttcctaggatttgcaccgacgccaacggtacctattcggccgcagagatgtgccagcacaccctcgacatgatgggctgccagttcgtcatgcctggagactacacgcctggcaccttcacctcgtgtgacggagactcggcctacccgcctggtgtctacccggtcggcggcgagggctctggaacgacttcgaccttcgctcagcgctacacgggaacctacatcgatgccactcagacgaacgtctacactgtcggctataccgccaccccgagcagcgcctactctgtgcccgcctcgtcaaactgccagacctactcgacgatctcgaacggcctgaccgacctcgtcgctgcgaccgcgaccgcttccactggcgcctcgtccgcttccgccacgatgagcgctggcgcctcatccggcgtcgctgctggtgtctcggcttcggccaagaccaccagcaaggtgtcggccgtcggccagtctgccagcgcgggggttgccgctgcctcgtccgctgcgacctcgaaggctggctcggccggccaacgcgagatgaccgctggctcgcctctcatcggcgtcgccttcgccgtcggagctggcattcttggcgcgggcgccctgctcctttgagcagcgcttcggatccccttctgcctgtcctctgccttatggacgtttgccctgcacgtctcccgtcgttaacttccttccccggaccgcctcgctctcgcacggccttgctctatcccacgctcctttgatcacacccgattgtccgacaatcgtcttgcaagattgagagcagcgacatcgtacacgcctttgcgagatccgccgggggctcgggtcggccgaccgccgactagcagggcctgcgtctgcccactttcatcacgcttcgccctctagcgggccgcgtctttgcgagtgtcggaggctttggccggccgctttactcggaccgtcgctcgcggaaggccttgcgctcggcccgctcggcaatgtcgagaccgacgagctacagaggccggccacgatgtcagcacaaacggtgcgccagggaagagcctgaaggggtcgcacgatcttgctggccttccagaactggacgacgttgatcacctgcttggtgaacatgatggggaagcagaggacggccgtgatgagcgggagcgagaggttggcgatgaagctgtcgacggcggcgagcagcttgggctggttgaggaggacggccggagggaagagggacgagatcgcgtgcgccggcaggccgagcggggccgagtagaagtggagaaggtagagggcgacaaagaaggtctcgttggcgaagcagaagacgaagaggacgcgctggggaggggcgaaggagggtcagctggaggatgcgtcagagctaaggtgaccgagcccgcactcacagtgtcggtgtagtagaggtagaggatgcgcgagacgtcggcggcgacgatcttgtgcgaggtcgcaccggtcgagagcgagctgaggaggcagcagtccgtattagccgtctggatcggccgcctgctcgccggcaggagagcgccgcacctgtacatgtgcatgtagtggctcgcaaaatcgagtgcgatcagaaactggaagatgagcgcgtattgcggggtggcaatcgcgaggaagcacagcaggcaggccgtcgaacacctgccgaaggaagaggttgtcagccttcgggcccatcgcttccgaagaggtgcagctcgatgccgggctccttcgacagcattcgacagctcccaccaagcggaaggactcaccggtcggtgaccatatcgaggacggcgccaaacttgctcgtctggtcgagcgcccgggcggccttaccgtcggcgacgtcgaggatcgacgagacaaagtagagcgccgtgcacatctttggcgcgtgcggcatgagcgtcagggccatgccggcgaggatgatgcgagcgtagcctgagtcgcgatggaagagtgagcagagctaggttagctcgtgtacagcgcttgtagaaggcgcacgagacgcgagccaaaggcatggcgagcggcccagcaagatcgcgccggacgaaccgatcaggttaggcacaaagagaaagacattctccttggaggccgtgctgagagggagacagggcagagcgctagagcatcagcggcctgcgagctagcttccaggcaaagagttgccggacgaggcggcagaggacagctcgctgaggcatggccgggggatgtgacgtacgcgaggtcgacggcctctttcgcatcaacccttgtctctgaccgcgagcgcgcccggccgcggttcgtcaggtcggcgtcgacggcgagcgaggcaaagggcgggccgtcctgggatcgtgtcttggccatcgtttaaggatgcgatgagtctggagaacggaagggggcaaggagggaggaggaggaggcagttgggagggcgagaggcgagctcgctcgtcgaggcggcgcaagcctcggccgcgcggccggcgaaatcgccccgggagaccgagtcgtgctgcggcgccgtcgtggatacgtccgtcagtgccgaattctggtctgcctgaaagcgagagagaggcaaagaggacgggaaggcatgacagaaaaagactgagaaacgtgccttcgctggacctcagctgcgcctcgcgaagacactcgcaagacttggattctaggaagcccatcgtacatctacgacgacgtggtgagtgaggggggcgcacgagtgtggcggggcagtgggagagggtgggtatggtgatgtacagagaacgcagagggcccgaagagtgtgcaaagagggaggtgagggaggacgtcgggcgggccgtctacaggccagcctcgtacttgagggcctcgaccatgccctcgtcgacaatcttgcgcgaggcgtccgagatctggggcaggggcgagcggacgaggccgccgagcttggggcccgactcggagcagtacttgtcaagcgcgtacttggtgccggcgatgccggccttgaccatgacccagtcggcctcggcgacgacgtcctggacggcgagcgcggcgtcccagtcggccttgctgccgctctcaatcgccttgctggcgaggtcatagagcttgaccatcgtcttggggatgacgttgccactgaggagggcgagcgccagtcagcgggagagcgccaggcgacatcagcgagcgcagaggagggcagacgtacgttccggtgatcatgccatgctggccggtgagcatcgccggagcgcagtagtcggcgaagccgggcatgacaaggctggcggagtaggcagaggaagaacgagcagagtcagtgtcttgagtcgttcctgagcactaagggcgcgaccggggctcacaaaggcgttgggtgccgcttcttgtactcggccgagcggacgtgacgggcaatacggtggccctttccgatgccggcgcacgtcagtttgacgccgacaatgttctggtgctccgagagcttgatgatgaggtcggacgtcaggtcgatgccggccgcggcgccggggaagttgtagatcatgacgggcaggggcgaggcgtcggcgacctcgataaagaagtcgtagatggcctgggtgtcgcggcccatggcaaaggcaaagtagcaagggtggatgacgatcctgaaaggagatggaaggaagagcgtcagccgcgagaagcagacgctgaggagactgcgaccgacggccaactcacgagaagtcggcgccggcctccttggcctcctttgcgagcttgatcgactcgcgtgcgctctggccaccggttccgacgagcagcgggacgtccttcaggttggccccgtcaagagccttgcgcgtctccgagatgatgaggacgcgctcctcgggctcaaggtggcaggcctcgccgttcgtgccgtggatgacctggcaaggacgagacagaggtcagcatctcacacgaggtgtaggcaagatgggctaccggcgccgggtgcgacacagcgcagcggccatcgccgacgccccgggccggccggcatcccggagagaggggccagagagaaatgcgacgtacgagtccggcgccggcctttgcgacacggacggcctgagcggtcagtgccgggacgtcgacatcgccgttcttcgtgaaagggcagatgagcgggacgaagacctgcggcgatggagaaggagagggaggaggtggtcagcccaggtcgaggggtgagtcaggaagggcaggcgcccgagaaccggcgacgcactccgggagagaactggcgggcgggcatgtctgagacgagaagagacggtcaagcgggttcgagtgagggtgggtgttgggtgggtaagagcagactggtcctgcttgctctctctttgaaggcccgggagaagagtcggcccgggccggcaggcggtccgcccggccggctcgatcgctcatcttctcccgcgcgcgccgcggctgcagccagcgaccagcagccggccgacgaccgcgtgtcagcgacaccgacgacctgtcagaggagccgctacgacgtgttgaaggagatctgaagagcaggtcgcgcagggagcagggcgggctgaggagcgtctcggtcagaacgtcggcaggctctcgccgctcaggcgaagctatgtctgccctgcttgcctgcttgcttgctgcgctctgcattcgaccccgcgtcctgacccatgacttcgcgcggggccgctaagaggaccgggctattcgcgagcgttcacaggaggacaggctcgcgcaggcgcaactgagattgagaggaagcgacgaggttgacccaggtgaggtcgctgccgctgctgctggacacgcgctgcttgcttacaagaagacatacaaatctttcgtccgcgccctcacgccttggcctggtccttaccgaggatctcgacgacgcgcgcaaccttgcccttgttgccctcgccaggagcgatcttcttgtcggtgcgggtgccgatgcggatgtcggtcgcgatcctcggcgttcccatctgccgtccggccgcgcgaaagaaaagggtcagcggccgtcgacaggttcgggacacgagggcagagacccggcttgcgaaaggactcacggcgtgcacagcggcgtggcactggccaatggcgtccatcacttgcgaccagggaccctcgaggttcgtgcctgcgacggagcacgtcggccacagcgtcagctccaaatgcgccatgatctgcgttctgccttgtcgaagaagcctgctactcaccgtagccatgcagagtgtagcagatgcccgacttctcgagcacgcgctggacctcggcaatctcggggccgactgacggcacgtcgaggcccatcgggatgaggcaaactgtgggccaaggcggagagcggtcgagcgaaagaaaaaggtaagcgacaggaggtcagccgtccattgttgagtatccggcgtgcatcaagagtgaaggcatcgccaaaagacgacgacgggacgccgcttgagcaacgtacagtctgagcagtcggggcagagggtcagccgaaggccggtcgtcagcacgcactcggccactttaaccagcatggggcacgagtcactacggacctgcgacagcgtagagctcctcagactgggcagcggtagacgacgacatgttggagctgcgagagatgggtcaagatggagagtgatggtacaaggggagccgacgggtcccgacgctcttcgcctcgagcgcgtcgaccacgagctcctcctgacgtcgacccgcttgtttctgcccatccttcctccatcagagccatggacccctcgcagcccggtccgagcaacgcggcctacgcctttgctcagccagcaggccagcaggccgcctactatgccccgccagcgtcgacggcccctccagcaggctcgtacgccgccgcgcctgcctccgcgacgggctccgcacctccagcaccgcagcttccgccgtcgtacggccagccgctgccaccaccgccaccgccgcaggcatatggcgcaccgggcggcgtcgcactcaacattgcctctcgcccaacacgccagcggcgcaagccagcgcggtacgacgagccgcaccgggcaacgggccctcgaccgtcgaagctcaagctcaacttctccaagaagggtgccgtcggcggccgctacgcatccttcctcgggcactatgatcgcgagatcgacagcgacgaggaggagctcgagatggaggagcatttcatcctccggatgccgggccaggacgaggctgacaagctgcgggccctcctgcgagccaagggcaaaggcaaggagggcaagaagggcaaggccaaagagacggccgccgacgagagcatcgagggcgtctggtttaaatttaagggtcagtcgcctgcgtagcggcaggggtccattggcatggccgagctcggcccagcgcctgactttcagcgtgtgactcgacccttctccttagactcgcgtcgagccgccttctcgctcaacggccagctctactcggccaagctcgtcgacttgccctcaattatcgaaagccagaagacgctcgacggcaagcagatgttcaaggtcgccgacatttcgcaggtgcgccaagatcccagagcacccgccctctgcgcagcggccgtgaggtggatccctgggctgacagcttcgtttttggctcccgcgaccttcaccgatttcagatgctccaggtgacgcacccaataagcagcgaggcctctgtacttgaaggcggaggcggcggcaaccactcaaggctcaacgtcgaggagtacatctacccgcacggcatcacgccgccgctgaggcacgtccgcaaacggcggtatcggaagcgggtgtctcgcagggtgcgtgccttgtcttcagaccgtcgacacttcgcatgactgacttgaaggcctcctttgccttgcagacgatcgagattgtcgaggaggaggtcgagcgcctgctggacgaggactcgaaagccgaccagtcgacctatggtgcgtctggtcttcgagacgtccctgcaggccctttgaaagctgacttgtcttgagcgttgacgcttgcagacgtcatcgagaacgccgaccccgacgcgtccgacaccgagttcctgacaccgacaggcacacccagacccagccggtcagagtacggcgacgagtcgtcctacgcgcatggtcacggcgggcatggctttgatggctctgagatgggggacggcgatgggacggggtcccgtttcggcggcacagacggcggctttgagggcggcccgggtggcggaggcggtgccgacggcttcgaccttgccgctgagctcacgagaggcctcaaggcgctcgatgagagcgccgacgaagacgaagaggacgacgacgacgaggatggcgaggacgacgatgatgacgacgaggtctgttttcctctcgaccggtcaaactgtggccatgggcgcacttgctgacccgctctacctcgcccatcaggacgacgacgatgacgacgacggctcagcggccgactcggaggatgaggaggctgtccaactcgctcagcgacagaagttgctcaacgaggagatccgcgacctcgaggctgccgtcgccaagaaacgggtcgagattgaaaagagcgccaacgtcatcatccgggttcgtctgtcgtcccctcgtcatgaactcaggaatgataggaacgctcacgctcgttatctcctgtagaaacgctttgaggacgcgctcaagaagcttcaggccgacttggacctcaagctatcggcgcgggcgacgaacgtcaaagagtgggtctccgcagtctgccctcgaaattccagccttgtcacaaggctgacccacgtcactctccgtcgcccacgcaggaaagagaagcggaagcgcgaggaggaggaggagaaggagcgcgaacaggccttccgggacgccgagaaggagcgcgcgaccgaggtcgccctcgctgcggccgcctccgagtcgcgcgctcgccaggcgcaagagcccgacgacgacggggacgtcgcggtcgacgacgagggcgacgccgtcctcggcgatggtacgcctgccccggtggcgcgggccatgcctgcggcccccgacgggtttcatgccggccaggtccacgtcgccggcggccaagcatcgcaggcatcggaacaggcggctgcccagggcattgaaagtctgatggcggccggcctcgacgccgagagcagcggcgacgacgaggacgacgacgaggacctctttggcgatgacggcaccgaggacgacgaagggtccgaggctagcatggacatcagctgataccgatatatgcatctctccgcaagcccccttccgccgtccagtctcagcagtagacgaggccgcagatgaagccaactatcccgaccgcataggcgagcaccgtctcgcgcttgttgctcggatgacgctcgaaggcccaagcgggctgcggcaggcccattgtgttgcagaagacgtgcgacaggaaaggcgacgcgatcgaccctggaaggtcgaggtaggacagtcagtggcaggaagttgccgtgggagagaaagcatgctcacccgttttgacgaacaagaaggccgcgaaccagccgaaaagggttgtataggcaaattggaaggctatgcgcagagagaagtgcagtttgtcagtctttatctgtgtctcaacagggcgaaggcttgcaggacgtactgcaggtcgcaagcgcgatcagcgccgcttgtctggttcggccgcgggcgacaaagacctcaaaagcgtgatgtacgtgcgctgctcaggggccagacgcgtggagagtcagcacgcataatggcgaggcctggattgtcgaaacgttgggcgtgagactgaccgaggccgaaccagagcggcgtgataaagacctgatgactccaggacgcgcccgagagctgcgcaagcgcgatgatgcacgaccggaagacgacctcctcggtcaagggcgcctagtgaagcaatggcgggttgacagcgtcagtatcttcctcaggggaggtctgtgaggctgatagaacgtacgacgacatagttgcggccgcccgtccatgacgccagcgcctgccaggcttccctcagccggagccgttcaaggaacacatccgagtagagagggccaaggaacaggacgggcgcgagcaggaacggcgctgctggtgatgtcaaagggctgagccatcggccggctgctgccccgagagacgcaagagtcgggagcgaccagctgctgagggagaagccagtgaggcgcgggaagccgagcagcgaccacgttgccttcgccgctgacagcgagggggatgcgagctggccccaggaagcggcgccagagtcatcagccggggcgtcgacaggttagaagcttatgatgaggactcacacccttgagccatgaggtcggctcgccgaggcctagctggacgacggcccagacgccgacgcagcaggcgacggtcgcccctccgacggccttcagccgagcccggatgacatcggggtggtccctcccaagcctgagccgttcctcctcggccgatgaagctgcttcagagctactgttgctgctggcggcatgcgggatccgggccgacttggcgaggtagagcgagccgacgtaggtggccgtgacgagcagcgagccggccgaggctgcgacgggggacagaagcggcagcgaacccgaagccatgaccaaagtcaaggtcgacatgccaaggtgggaatcgatgcgtacgaccgctagagatggaggtcgcggatggaaggtcggaggcacgagctcaaggagcgctggctcgcacgacaaaagggcgcgccaggtgctgctgcgcgtctgcacgacgaacaaggccgccagctcgacaaaagaaggtcggcccagcctccaacagtcgctcatcgcaaggggtcatggatcgttcagatgctcgagcgggtcgatacaaatgatgccgccgccttcgctccatgggtagcgccaatgcgagagccacgtcttgaccgactggccgagccggaccttggacgcgccccggccggcgtcctgcgtgcccgtgtgcttctctaagccgacaatgacgtacgctgtagaagagacggaagccttgcgtcagtaagagggagcgggctgcaagtgagagaatgcgacgcaccgagaccggtgtagcgctcggcttcgagcgctagcagccactgctcgagcacgagcaccgcctcactcccatggagcaggtgaacgtcgcacagggcctcctcgcgctcggcgctcgtcagcccgcccccgcccgagctcgcgacgccgaggatgacgccgagcgcgccgccgcagaggacgcccttacgcgcacggtcacgcgggtcggtcgtcctgccctcgcgggcgcgcgcggcgtcctggacgattcggagtcggtcgcggacgagcctgcgcggagagggaggcgccggttgtgagtacaggagccatcagcctgtcgcttgtcgcgcgccgcagggacgtacttctcggcagccgtgttgttctcgccgttcatctggtcgttgaggtcctggccctccttcgagaaccgcttcgcggcagcgccgtcgccccgcttccaggcctctgccgccttggcgaggtaggcgttgcgctgagtgccgagatcgatcgccttggcccgggccgacatatactgcgcattgagagacgcgccggtcggaagcgtcggcaggagcgatggtgggcggagcgggagccgggccgacggccgagggacggcggccgagagcgacgacgagacggggaaggttgaccggatcggcgtcggtgcggcgggcgaggaggaggttgcgacgagcgccggcggggcgacagcagccttcttgacggcactgataaagggaagaagcggcgcgcctcaggttaacgacgagaccaaggaagaagttgctcgcgacctggacgcacgaagagaagcgcgtccgactcgtgtcgctcttgacgggcgctgccttgggcacgctcttcgccggcgcgccaccacctaggacaggaaagtcgtcatcctccggcagaggcgtcgtcggcgtgctgctctcgctcgggctgatgtcgagcccgacggccggcgcgagtgtgtcggggtcaaacgtcggcggcagcgtgtgaatgaactgaggtagaacgagtgcgtgagcaactggccgtcaaggcgacgcgcggccagccacatggaagattcacctcgcactgctcgccctttgcgcattgtccgcggagccagaagcggcagagggcacgctcaatatcgtggctgcgacgaggcaggcaagcgatcagtgacgggctctcaaatgcaaaatgtcccgatcgaagccctcacctgaagcggcagtcggcccggcggcactcgccattgaggtagtaccggcagacgcggccgccataagggctcttcgtgctgtagctcgtcgggctcgccggccggccgatgctgatgcccgcgccgttccggccgccggcgacgacgtagccctcgcgcgggacgaacgctttggccgcggcggacggcgtaggagcgacgatggcgatcgcagacgagcctgcgcttgacgacggtggaaggccggtcgaagaagatccgcccgccgaggggagtccggcgccgctcgctccgccgtcatccgcgccgccgccggccgaggtcgagaggtactgcatcgtcgagtcaaagtcgtaaccgtgcttgtggagggcgacctcgacctcatgcgtgctcaggccggtaaagatggacgaaaggaggtccatcggcgtcatgccggccgggaggaagtcgtcctcggccgagccgaggttgccgggcgaaaagagctcgtccatctcgcccatcgtcatctgctgagggaacgaatggcccgaggacgagaaggagccagaggacgagggctcgccttcgccgagcgaggacgggcccagcccgccgccggacggatggtgcaggccgctgctgccggcagggagcgagccaaacggcgaaaagtcgtcctcgtcctcttcgtcgtcgatccgcgagtgccggtggtgggcggcactgagcggcttggggacgctcagttgctggctagaagcgctgccgaccgcctccccgccgagggcaaagttggacgccgagcgcataagcgaaggcgccggcccaccgagcgagctgccgatggaccagtcgaccggactactggggctaccaacgaacgggccgccgacgacaacggcgtgcgccgtccgaggcgacggccggaattcgacggcccgggccgacagcgtctttgggctgaggattggcgacgcacccgacgtcggcgatgaggaggacgcggatgccggagggatgagcgccgcggttacggtcgccgacggcgagcgcgacacagcgagacctgcaagtccgctcaagcgcgaaggcgaggccgacagggcgctgtacgaggctgagggcgagaatgacatgccgccagcagcgggcaagatgggctgcgcgaacgagccgaggggcgtgagcggccggaaggtgagcgacgtcttggagagcgacgacgacgacgtccgggcggctggccgcttgggtgtcgcgagcgaggttggcgtgaagggcacctggttcatgtcgtctgcgagtgggatgtggtgtgatgggtaagtggaggctggtgccaggacgaggcggcgcagtggcgacggccgcagccaaaggctctcgcgcgcgcgcgataggggtgcggacgacgcacctcggaccttgtgcataagcgaaaggatgtactgatcgagaacagattcaccggcctgaggggtagtcaacgaacgaagaagagtcagctctgatggcattaagggggaccggcccggtctcggaagccagcatggggaatgaagggagggagatcgtctgtggagggcccgtcccctcgatgttcgacgaacctcgaggccgagctcgacgcccatcaggtccttggcggcgtcctcctcctccatgatgatgaggtcgacgagctgctcgacgagcgcctcgcgcaagagcgtcgacggccggccgaccgggtcgggaccggtcgtcgttggcggcggcgacgacgcggcgccggcggcggatggcctcctcgccggatggttctggaggaggtggccgacaaagtgggccgtgtgggcgtagggctgggccatcgtggcgcgctgctgccttgtgctgcttgcggtgctggtgctgctggtgctgagtgttgcgacggccggcgccgctgctctcgtccatcgcgcgcgcgtgtgttgggcggcgtaactcggcggcccttgttacggccgtgcccatcgcgcccggggcgtgcgtgcactggcgactcagcggctcacgacagcaacgacccctcaccctcaccttccctcctttgtagcacctccccactcgacagcatcaacccccgtccacaatggtacgtaccgcttgcgaggacgtgacgctcctccatctcgcctgcagacgacgcaaggcaggtcgctgaccatctacgcccctccttctgctccccttgatttcccggtgccttcctccggtccgctcgcttgctcgactccgctgcccggccggtccttgccttgcccgctcacaggagaagattaaggaggtgcgctccttttcttcgcgttgactcggagcgaggcgggcactggccggtcgagatgacacttggagctgacgctcattccacgcgcctgcccatctcacctcctccctctcgtcactgcctcgccactcgtccactttgaacgcccccccgttctagaaactcaactcgctccggactgaggccgactctgcgatcgagcgtgccgagacggccgaggccaagaacaagacggccgagcaggagctcctgaccaaggaccaggagatcacctcgctctcgcaccgcgtctcgctcctcgaggccgagctcgaaaaggtcgagagcaagcttgccgacgcaaagagcgccggggaggagagcgaggtccacaagagtggtaacgagagcctgacgcgtaaggtccaggtgctcgaggaggagctcgaggcatccgagaccaagctcaaggcgacgaccgaggagtgcgtctcgctgcgctgcgggcctttgatctcatttgcaggctgctgacgcgcgtcttgccgtctcttgtaccgcaggctgcgccaggtcgacgtcaaggccgagcactttgagcgtcaggtgtcacgcatcgagcaggagcgcgaccagtgggagcagaagtacgaggtccgtctcgctcttggccccttgcccggctggccccttcctactggaactacagcaccgcgtagcatctggcggcttgatccgtctcttgtcgcgccgagcagtctcgctgacctcttcccaatcgttcgccccgaaacaggaggcgatggagaagtactcgcagtcgaagcgcgagctcgacgagctcgtcacctcgatggaggtgtgtctgcctcttccgtcacactgcgtggctgcctgcccgagtgctaacgcgagaccttccgggacggcagggcctctgaatcgctgccgtgccacctacaccaaccctcacgacccctctaccccccgccccgcccgtcaccttttcctcttcccctctccccgcccctacctgcctgcgtccgacgccccctcttccgcactgggcagccctcggctgtatcgacagccatctatccgcccctggctagtgcgcccgtaacgaacgcgtcgacgcttttgctcgacgtctggcggagccctgtcatcctcctccacaccctctcgcgaaggcgacgtcactctccggaccccatcctctttcgtcggacgtctttgctgacgcccgctgctaccctccaccgctatgtgatccgcccctacgaccgccagccgacccttccatcacgcccgtgtcgtcggccccagtcgtcgagtcgtcctcgaccaccccagtcacgccgccctcatcctcgagcgccgtcgtcgtcccctcgtcctcttcagccgtcgtctcctcggctgccatcgagtcttcagccgctgtcagctcggctgccgccgcttcctcgtctgcggctgcttcggcctcggcagcgagcagcgtcgctgcaggctcgagctcggccgcagcggcgtcttcgcaggcctcggccgttgcatcggcctcaagcgccctgccctcgtcgagcacgctcgtcagcacgctcccgaacggctcggtcgtctcgagcatcgtcggacgctcgtcgagctttgtgtgggttgctcgacacttccgcttgctggctgctgctgctgctgccgagtctcttgctgaccgctcactgctcgcccgctcgcacagcaccgttaccgtcaccggcgccaatggcgagacctcagccatcacatcgtcggtgcccatcccgggcgaaggtggctcgtcgaccaacgtcggtgccatcgtcggtggagtgtgagtctgctcggccattttgctgcgcccgctccaacagcggctgactgagctttctgtctgccctttcctcgtttcttccagcgtcggcggtgtcggcggtgcgctcctcatcgcagccggaatctggctctattgccgacgccgcaacaagcacgaggactttgacgagtcgatgtgtgcgtccccttggcgcctgcacgtcttgacccggccggtcggtggctgacctctcgtccctcgacccccgcagtcgaccccgaccgcggacgccctgttgagcaggacgacaatctcgacctgacggcaggcggcgcaccggccgctacgccctacacgtacggcagcaacccagtgacggccccgggcccgagcgagatggccgaggccaacgcttacggcgccggctacccgtcggcgacgggctatggcagcggcggcgcgggtactgctgcggcgtacggcgctgctggcgctgctggcctcggtgccggagcgctctacaatgccggccagcaccacggccagccccaggctgctcagcagcagcagtactaccagcagtcgtctcagcccgccccgggcggcgcggccgtcacgcgtggcccatcatcggcgtccgccctcagcggctcgaccgccggcgcgacctcctcgagtggagcgacgccgagcagcgctggagccggcggcatcaccgctgctgctgctgccaagcgggccgaggcccagcgcgagcggacccgattgcagtcgaacggcggctttgccgaggagcctgcgggcgctgcttcgactactgctccgggaggaacgtaccagcaccaggacggcggccggatgcaggagaacgaggacgcctcggacgaggcggccgaggtcccgccgacgtacgactcgattcccgccgaccgtcgttaagactccttccagcgctgccattcgctgcctcccgtcgtccgatctcgttcgccgatttcggctcgacccttcccacactcctttctcgaacctctgctttccactccttgctttgcacctctgcactcacaaaacggacactctttgccccttctctccccctgttgcccgcctacttgtagggctcccccgagccctcaacccgactctcgtttcccaacccgatcgaccccccgcctttcgccgttctgccgttgttgcacccaccgccttctgcgctttcattcgctcgcatgacgttctaatctgagatcgccctcgcggggggggacgagcaaggtcgggcatcatgcaaaggatgcgggctagatacagttgagtgattcgcgtgaaggagaagaggggtcgtgagggtaggtgggcggcaacctgatcagaaggtggccatcagactgtcgtcgtcgaaagcgtgctggccaacatagacggtgaactcgccctcggggcgggtccaagtttggctcacgacgtcccaaatggaaacgtcataagtggaaagctggatcgtgatgtgctcggacgcgccgcctgctagcttgacgtgctcaaagccgcggaggaccttgggcggctcgccggccgaggcggggaaaccgaggtagacctgcgggatcgtgcaggcagtcattgtttttgactcgttggtgacgtcaaactcgacggtgatgcgcggagcgtgaagcctggcgaaggcagtcgcagcgtcagccggcagtcgcgagaatgaacggaggaaggcacgcaccactcggctaccgagctgccgacctggccgaccagcttgctggccggcgccgtgccgttgagggcgggtgcggtcgaggccgagctgttggacgagctctcgtcccacgaccgccgataggcgtgctcgtcggtgaggtgtcgcttcgtcattggccgctcgctgacggtcaggttcgtcatggtgaagtcggcgtagctcaggccaaagccgaagccaaacagaggctcaatctgcaagaagcgagctcaaggatcagtcgccgaccaaagctggccgaggcaggccgcgcgacgcaccgacttggcctgaaagtggcggtagtcgatcgcgagctcctccgtgtagtcgacctggacatagttcttcgatgacgggtaaaacgggatcatggtcgggtagtcgtcgaagcgtctcgcgatcgtgaacggaagtcgaccggcggggctgtaggcgcccgagagaacgtcgacaagcgagtttccggcctcctgacctgcaaggcctgagtagacgacggccgtgatgtttgggttgtcgatccagggcatcaaaatgggaccgacagactgcacgacgacgattgtgtttgcgttgttggcggcagttgcgttgaccatcgcgtcgccattgtgccacgccgtcaggttgttgcggtcgccctcgttcgagtcgacggtgatgtactctgaagagccgaggcgaccaggtcagccgagacagcgggacgcctggcagatcaaaaggggaactcacgctcgccactgttggagccaataaagacgatcgcggcgtccgcgtacgtcgccgtcttgttgaccgaggcgagatcccagttgtcgagcgtccagcggacaatcttgttctccttgaccgaccacgcctggagcgcctccaggggtgaaacgaggtatggcagctcgccggttccgcttccccatctgcccgaacggcgccgaaagaggagtgtcagtgagaaacgcctgcgcggaagcaggcggatcggacgcacccttcggcaagaacaccatcaagaccgccgcggtcaccatagccgttcggccccttggaggacgggccggcagcgttgccaatcagcgcaaccgtcttcaggtccttgcccagcggaagggcgccatttgcgttttttagcaagacggtcgaggccgcgccaatctctcggatgatcctgtgagggaaaggccgatcagcgacagccgctcagcctcggagcttagctcgcgcacgcacttgtaatggtcagcgcggacgtcgatgtgctcacccttgccgagcgggtcccagctatcaaagttagtgaccgtatggttcttgtcctggtcgaggaggcaccaagaggcaacgatcctcgtcgccatgtctttgacgcgctcgaaagggacactgccgttgttgacggccatcgttaggttggcgccaaagtaggtcgagtttgaattaaagatgatgtctccaggctaaggaggagcgatgctcttggtcagccctgctcgggttcctgcagaccaacgtcatgcggcgactcaccatcgtcatgtcgagccctgcgttgaccgatggaggccccgtcatggttgcctggcggaaaagcgacaagtcagggcttgcgcaagagagcatcgcagtcgggacaaaggccgggcgtacctgccagtcagaaaggatggttccctggaagccaagctcacgcttgagaacatcgttctggagctttgcgttttcacacgcgtaggctggaacgagtcggtacgagggcgagtcagtccctaagcagggcctcaggagggatcaaatgcagcaaactgactgttgttgactacggacagaagggaggacgaagagagcgcgcttctgtcagcatctcgcgcaagaaagcagaggacgaagcagcgacccgcttagattgtaactgcactggaggacaaaaggatcaaagggactgctcgtcagcttcggccaaggcccatcagcagcgatgacagtagggactcaccatcaccgtcgcaacgttggcttggacggctcgaaggaaaggatgcaagtagacctcgtgcagtgtgcgatcgtcgatgttggatgacgagtacgtccggttgtgctcttcctcgttgccgataaagtgcttggcattggcctgaacacccgtcgactggatgcccatcacagtctcgtaagcgccctcgccgacgaggtaagggtctgtcgcggcacagagagtcgtcagcctcctgacagcagacggcgagcgacaggagagacggacctgcgccgaaggactcccactgtttgtgagcgagtgatgagagggcggttgggagcagaaaggggcggtcagcggccggtgcagacgggacgagcagatgactcgcgagcggagcgactgacgttgcggcctccctgagcgttgcgctgtcgttgtcgagatggcagagtgatggtcagctcttgctgggtgcggaagcgcttgaagtgccagagggcggtgacaactcacgccgatgccgatagcaggacccaaagcaatctggacgcccttagcagcgaactcctggcccattgcgacgccccgagcgtgcatgagcttgcggtcaaacgtagcggcagcgttaatgcctgttcgcacggcggagtcagtctcggcggcgcgcagcagccgaccaccaccactacgcaacatcccggcaatacgacgcaggacgaccaacacgacgcaggacgtaccggcagggaaaacggagacgagatccgcaaagcggacggacgttggggaatcttgcaaacataaacctggaaatccaacctcgggctgaggtgcgatgtttccgcttcgagcgagcagaagggggggagggggggcaaaggtgtcagggccgggaggcagacgttcgaacgcagcagcacgagctctcacacgcaagggcccgccatccagccgacgcccgtcgtcacgttgacgagctgctcgagcgtccagttgtccgtcatgttccgagcacggccaacggcgctcgcccaagcaccctcgccgcggacctcgatggccgggtactcgtcgggcccgcccgacgtcgcagacggcttggcggccgcggtaacggtgaccgtcacgtactggacgctgacgctcgggcagacgtctgacgcggctgagggcagggcggtcgggaaggccgacgctgccgtcgctggcgaagacgagacggcggtcgctgcggccgaggacgcctgagccgaggcgccgacggcagacgcaaaggatgaggacgaagcgtagacggaggaaccgttcatggggacggcgacggctgagctggccgagccgaggacggcggcaagcgcgaggcccgccagttgcggtgaagagagcatgtcgagccgagggctggcggaggatgcgacggcgagaagggagaggagggcgatgaggatcaagacgacggccataacgccgacgacgctcgcctttgaggaattcctcgcgacgggccaacctcggacgggtgaaccggctctcgtagggagctgctaagggtgcggggtagggagggtagctggggagatcagccacagcaggtcggcggccatcgccgagatctcggagggaggttcgcacctcgtctggccggccgcccttgcttgctcggccgtcatcactcgtcgccatgtgtgacttcaaggccaagcagagggacgaggcagcgatggaaggaggagctcggcgatggatttgcggccggcagggtcgcaagtagggctgagatcagaaagagctcggctgagcggcctccgctgttgccggcggctcggccttgcgggttctcgggtcaagttcgccgggtggcgcgtcgtttgctgggcgctttaggtcagcagactcctggattgagctaggggaacggacggcgggctgctagcgtcggaggcgtcgcggtgcagagcagaggtgggcggcggccagaggttgatgccgcgcccgagaccggcttccgcgcatcttcccaccgtcggtcggcagaaagggtgctcagatgtcgccgaggcgtacacacgtctcccgcagcacgtacctctcgccagtacgcgagtgacgcatgagacccggttgagtcctacagtcatctgcgtcgcatcttctcaagccgcccgctcgcccaagcacggccatcgtgccaaccaaactagcgcgtcaatgcgcgaccggcggtgagccttctcgtcgggacccatgctttgcctgtgaccagcggcgaaaggtcggatcgagcaaagggacgagaatggatacagtggcggggggggcagaagccggcggcttcgtcgttggcgtcgccgcgcgcgcctacagagagcgagccgggccttgtggtttcgtctcacgaccgaccccagctccaccagctgcgactcggctgctgctggtccggggcaatcgtcgtcgtcgtcgtctccgagtcggcatcgttgtgcgacgtgccgtccttggcgtcgttcgtgagggcatcgacgacgccttggccaccggccgccttggagaacatctcgcgcagcgtcgacgacacactccgtccgtgacgctcctgcagatcagcgagatcggcctcgagcgaggtgacctgggcgttgagggcgagcagctcgcgctcggccgacaggctcagccggagcaggtggagcgcctgatgcgcggcgagccgaggggaagcggcggcaggcagcaggaaagaagggaggactgtcagccatgacctgcagcgagagaaaagtcttctccagagcgacgttgccctgactgcaccatgtagacaccaaggccgatcgctagcgcaggcagggcggccgggacgagctcccggtaccactgcttgtgcttgttgggattggccttgtccctctgctggctgccacttgaggagccgacatgagatgctgctgccgcagctgtcgaagacgacgccgacgttagcagaaagcggcgctggaggatgccggcggttgagggggcgagggcatgacgaggcgctgctcgccgggcgacgaggccgaggagcgcgaccgacgggcggagggacgacattggcgcgatcctttttttctcttcgagctgcttgagtgagagagcgtgcgagtgcctgcaagggatagaggacgccttgacgagctatatctgagagaggacaagacagaagaggagctgctggacgaggcaagtgaccgttggccggggggacgacgaagcggccgacctcgcccctttccggcagaacccatcaacgtcgacctcaacttccgtttgccccgactcctgcagcccatctccgaccgcctgctgggcatgcctgctgggcatggatcggccgacatgaccgtctccctctcgccttttcctggctcgcagccctgccgtctcgccgtcaaggttgaaggcccgcagcaacagcagcagctccacgcggtctcacctccctcctcggccgcacgcgagaagcatcggccgtcgatgctgcacaccgaccgttcgaaatttgggagcgtgagttcgctcccaccgtacgaggctctctacggggcatcgcgttccgctcaggatggctcgccgatcttggatatggtcccgaccgaggtggccgaggctcaagccgagccgccgcttccaagccttcctcggacgctcgaagctagggtcgagtcgctcgaaggcgattcggagatcgagctcgacgaatcgatccagctcgaccgactcgttctacggtcgtcgctcgctctcgcagcggcgcaagcggtgctcgccggcacgctgtcggtccgcggagccatcctcgacctcaactctcgagacgttgagggcgacgccggcctggagcggatcgaggtcgagacgcacatccggtcagtagcgctccgcatcctctgactactttgcggcaccgctgactgacgcctcaacgccccatcaggatgcgccgcgacgccgagcaggctgacgcgctcgaaccgctactgcgtgacctgtcggccgcgctcgacggcctcgaggatccatccttctcgagagcggcgacctccaagtcgtccattctcagccgccgactcgaagttggccgcgggtcggtcggcgaactcagcgcgacgcgggtggaggccgaatggacgacccggcggccgagcgaggtcgaccagatcaagcggccttcgccgagccaaagctcgcatccgacgtactcgctcgatactccgggtcgagacagagcctgcagctcgcgaggtgtcccaccctcgtcacctctggccgatcgggccaacgtcggcaggccgtcacccgtcagcgtcgatctggctacatcctcctcgtcactctggccgttgcgccggtcgtccacctcgactggagaccactcttcgtttgagcccccaccgagttcgcagccaccaggtcttgactcggagcagatagccgaccggactctgtcagtcggcgagcggtcgtgttcagagacaacaccgacgaaggcctcggccaacttgccggcggttgaacggcccatgccttcgaccccagatccgccaaaacgctcaaaagagccatcgccgtcctgtccgagggcaggtcagcatacccggtcgctctcggcttttcttccatctgtcgccctgccatccctcgccggctcgtctgccgccgaaccaccagaccacggctcgagtccctcaaggctagccggaccgtcagcggccagcagtccggccatcagccgtctcaggtcgctcggcgcctcaccctctgcgacgtccccccagccggccgccaagagctggggctggttcgccacggcatccccttcttagcatcacgtcatcgcacgcccgcctcctgccttctcggctctcatacccctttgcgcgagaacgaccgtcgcgtctttgcctcgcctcccgctcatttacccttcccctagcatacccgcccgtcccagtcgctccttccgtccttctgtgtcgcccaagcgcatccattgtacaacatgatccctctttgcccaccactcgcaatcaagagcgtgtcaactccgactagcgcggcgctactttcgctgccacttgtctgtctgcgagcgaggagccaaatgttttagcagcgcgcctcgcgactagagtgccatcatccgatcctaacagacctttggcctcgttgctggcggccgatactctgcctcctggccacgctcgaccctgacctgtctgaacgcctcctcgaggtctggcgcgtccgcgtactcgccacctccgtaggtgaagcggccgaagttgagctgaagtagatctctgaaagcttcgtcctcgagcgcgtggtcgagcaggtagcgactgggagcaagtgagggcggtcagccggaaactcgcctccgaaggaagacgacaggaggaggcggatgaggacatcgcctcggcccctatgggagataattacggctgccctcggcctctcatcgtttgtctgactgaagcaatgacacgtaccgaacggtggagagtgcaaagggcttcttgcgactaacagtgggtggcagaaggggcgaggatggttagccccggtgatgcagaatgaagcttgcagtcgcagccagcggtcggacgtacccgccgacgagcgacctcagctcctctggcagcttgccttgatcaaacagctcggccgctcgatggatccggccctttttgagctcgtcttcggctttgcgggctgcgtcaaactcctcgcgcgtcgcatactgcacctccttgcctgtcgcgatggggacgacgatcaggttggcctcgcgcaggcgctccttctcggcccgcgccttgcgagcgcgcttcacaaagaaagcactcgactgggacggcgtacgtctcggcttgggacccgtggctgctgccggcagatgagagactggagcttcgtcgctcgccggcgagcccgcattctcggcggtcaagggcagcttggtcgaggcagccggcgccttgcgcaagctcgacgaggccttggcagcgtaccagcggccagtcgacgagctgaactgagcggctggcacagcagccttccggaaggctggaaggagtagtctgagcattgtgcgaaaggtctgcagacgacgttgaggtcggtcgatggcggtggtggttgttcggagaggcgtggcaatggccagactgcgcgggcgtttcgatgacgcggccgcacatgagttcctgatcgccggcacttgggaaaaattctctgcagcggttcgctgcttctctgagggcaagatcaatactgacagacgtgcagcatgtcatgaaaatgactcgtgaccgccgacggagccagcctgcagcgtcccccgccaaaccatcccctccgtcagggcttccgtcctcggatcgacctcgcgccaaagctcatcccgggcgttccagcaaaagatgccgtgcgggacgatggagcagccggcagcttcggcgagggcgataaagcgctcgacagccgacgaggtcccgccgtgcaggccggcagcgatgtgcgcctttggccgaggctcggtgtcgtcgtccgagcgtcgaaggagcgcgagaaccgacttgaggagatcggcatgcgctgccgagtagtagagaaggtcgcacagcaggagatggtcgatccgaggcggccgaccgggcgctgcaagctgggtgaagatcggctcgacgtcctcgccccacctgtggtccacgacggcccagcggacactcgaggtgctaccgtcgctagggacaaggttccgccgatagttgtcttcaagtgccgcgaggatggcagcatcgccccagtctgtcgagatgacggtccctcttccggtccgctcgaggcagacggcggcaaggaggccgccgagaccagcgccggcgccgagctcgacgaccgtctggcccggccggaggacgatctcaccgctgttgcggagcagcagatctgccaggagcagcgacgaaggccagatgtactgcgcctggagcgaattgagccccgccggcggcgaaggcaaggcgagctcgagctcacgaccggcgagggccgcgtgccggaaggtgtagcaggcggcgcccggcggggccgagaaagcgatcaccggctgatcaaagagcgagaagagagcatcctcgaagacggtcaggctgtcgtccgagccagcctccgggcccatgcgatgagagaggcgaggcgaaaggcgagtctagggaggccaggccgggcgtcgtcgagcagcagcgcaacctccttcgtgagccaggtcggcggcggattcttgcttccgaacctcaccccgcgtcgctctcaagtcgagcgaggagtcgtcgagcgagctggtctcaacaccctgacccactcttactcccggccgaccgaaattcttcttctccctccgcagagatcatgaacggtccgatagcaaggcccgatggggtggcgggagcgaagaaggacgcgcaggtcgacggtacgcgtagccttggccgtatcgccttagaaaccgcagctcgctgatgcgtctcgcatctcgccctctgtgcaccctcgccagagccctactttcagtgcgcgctactgggactgacctagcttcgcagcggactggactgacctttgaccgctccgcctcaggtactactcgagcttgcaaaaccaggtcagccggccggagcgaaacgcgctgcgggcccaggggctgaccctgctccctgatcatctcgccgtcgcaggccaacatgctgtcggacgtcatccggacgacaagctacaggtacattcactggtgcaaggcgtcctcagaggctcgcacgactgacggccctcaccgcgctctcgcaggaaagccatcatcggcaacgccgtcccctcgttcgagggcaagacggtgatggacgtcggtgcgggcaatggcgtcctgagcttctttgcgatcgaggtgcgctcagtcagcccttctcgttgcctctcttcctgactgattttcgctactgtacatcgcccgcccaggccggcgcgaaactcgtctatgcctgcgaggcaagcaacatggccgacaagctgcagctcgtgcgtcagcgcccctcgacagctctctgaacgctctctcgactgacctcaaccccctctcagatcgtcgacgaggccgaccggggaggtgccaacccccacctgaaggacaaggttaaggtcgtcaagggcaagatcgaagactatgacgggccaaaggtcgatacgctcgtctcggagccgataggtgtgtcctttgtcgatctgtctcgcagattcgtttctctgacccccttcttccttgcatgtccaggcgtcctgctcgtgcacgagcgcatgatcgagtcctacattcacgcgcgagaccggttcctgaagcccggaggctgtgtgtgccagtccttctggcgcgctcccatttacggctcctgatcaactcccccccttctgctcctttagcgatgtacccgtcggctggcgtcatccatctcgcgccgttctcagacgagacgctctaccacgagacagtcacgaagggctcctacttccgccagggcgagctctacggcgtcgacatgtcggtcctgcacgactcggccgtcgacgaggtctttcgccagccggtcgtcggtctctttgcgccaaacctgttgacgtcgggctcgacgtcgcagcatgcgctcgacttgacgaccgtcagcgctgaggttagtgcgacctgcaggtgccgctcctacttagtctcggctgaccacgcctcgtgatgggctcgagcaggacctgaaaaactttacgattccgatcgattggctgatcgagcgcacctcgtcggtcctcatgtttcattgaggtcgcgtgcccagacggtggcttactttctctcccttctgcaccgttcaacaggctcctacacggtgtgcgtcttctgtcggcttgcgaaccggcccgctgcttgtcaaactgatccggtctgtcttccctccagatcgccacctggttcgacatcaactttgatccgccgacgacggccgagacgccgatggaccaccaggcagctgccgcctgggaggcttcgatttgggcgcccgtcgacggcaatggcgcgccgactggcctcggctcgaccatctacccgcctccacctccgacaggagtcagcacgtcgatcccgaccggcccgcacgatggcaagacgcattggcagcaggcacgcttgctcttgtgcgtcgcctcgcaccctccgcttggaaaccttgctgaccttccgcgcacactgctcgccgcctgttagagcggaacctctggccgtcaacgtcgtacgtcctggaggtctgtgcttcgatctgatacgagctaacgtctctccactcacgttccgctgcgccagggcgaagtcgtgcagggtgcgtcgtcctcaagcgacaaaaagcttgacgacggacgacagctgacgcccgctttgactctcctacgcttcaggctttcttgacttcaaggccaacgaccagcgttcgtacgacctgacggccgagctctggatcgcccgcccaggccaagaggacgacccgctgctccggcggagcggctcctatgctcttcatctccaggtacgggcgccttccttccgtcctgacgaccggcagaccctttctgatcgtcgcctttcgctccagagcttcaactactcgtatgcaagttgattccgaccgcttgcgcgcagccgaagctcggcgatgcgtcagccgcagagatccggcagtctcgcgcccatcatcagggcaacggggaacaggacatagtgtccgattttcccttgctggccctccttgcatctgccggccctcttgtgcctgattcggcgtcggccgagacgtgcgagctgccctccgagtacagacgtcccctcgagatggccgtgagattaagccctgctttgacagttgttgaccttgtactagaggccgaccgctgtcttcttgtcgacgaaacaaatgcgagtggaccaccaaacctgtcagcgtctgtctgccccgctgagcaagacggcagagacgcgcgaactgggtcgggcgcggagtgtcccgcggccggctcatcgccctcgccctcgcccccagtccccttgccgcccatccctctccgccagcccctttgcagcgcccacgtctagccaactcgtcgctcctacatcctctagccagccgtctctctgcctcgacgcgacgcgacgccgccgacgagtcctaggcgctcgtctgcgagatccgtgccgccccgagcgagctccctctcagccccgcccgctcgccccctgtcagctcggtcgccgcaacccgagatccacccgacgaccgcgcccgtcgctcgacgttccctgctagccctgctctctttatcgtcgtagcaggttctctctctctaggtacgtcgtcctcgtcagccccgctgggacatgcccggtcgcaggacgttaggctcggtgctgagcgctcgtgtctctcctcccgaccgacgccgcggccgccctccgtacccgcccttcgcagccttattcgccctctcgctccaggccagacccgaagtcgcgctcgcatctctctggccgtcggtcgcaagcccagtcagccgcttcgccgtcgagcctctggatgagcagctcccagcaggaagccgagccggaacctgttgcagccgccgccgccgctcttgcggtggagggctcgcagcaggcgacagccagcccccggcccatcccgcagacggcgtcggcggcctacagccgcccaaagggctcgacgcactcgtcagagagctcgcacagctcatcgccgctcgctactgaagtcgggagctcgtcgaacacctcgggccagccgcttgactctcgcgccaggcgcgacgctatctcgcgcccgtccagcggtgcggccggtgccgaagccggtccctcgtcgtccgtgtccatcatcgaggccccgggcccgtctaggggcacgtctcgtcagtcgacgccgccgccacttgaggcgccaatcccgctctcggggacgagcggtctgctgctcggcacggcgacgggccaggccgggatgctcagcatcgcccctccgcgccgcaacttcgccgccacgccgtcgatgccgtccccgctcgctcggccgtcaatcgttccgaacaggaactcggatgacgacgaagacgatgtgctcgacgccgatgtcgagacggcgacgctcgagccagtgcccgacgccgtgcctctgagcgacggacgagcggtaagggtcgtctcgaagcgacgcacctcgtcggcggccgctctgcttggaaccagtcccagagcgacatcacccaacgcactggtccagcagctctttcctggcggccgaccgccgccggcgccaccttcgtccagctcggccatcagcacgaatagctcggacgctggcagcccaacagcggccgaccttaacgcgctcggcctcgtgaccgcagcgcagacgatccgcaaagagcggcagctctcggacggctcggtcggtcgatctgatcactcaagcccatcgacgtcgtgcgtggcttcctcttaaagttcccttctagtcatgctgacctcgagccgctcttgtagaccaaaccgcgtccgccggcgaacagactttatcggcgctctggctccgccttctggaagcgggcggcatccgagcctctcggtcccggcgacgtcgccggggaagcacgtctcgccgctcaatccgctgccgacgccgtggtcggcaagctcgcaggcgtcgtcgtcgctgtcggcttcgcccgactcatctgcgcccatccgcctgacgcgcattccgacctcggttcgcctcgcgtctgatctactttcctcgtcgccggccacttcgagcggtcaggccagtgcgaacggcaagcctttccggtcggacatgtttgccggcctcgccctctcatcgccgcaacctcagccgtttgttactggccagggctcgacctcaaaccacagctcgacgccggcgacgagccagccatcgagccagccatcgagtccgaagctgcacgcaatcctcgactccaaaatggcgacaccccatccgtcgccgacgtctgacgagggcgagctgcctgggtcggctgccgatcacatgtcggcctcgtggctcacggcgtcctcgctctccaagtcacggggctcgcccatgccgccacagcctacgccgccctccacctttgccgccggcacctcgcttcccggtcccgcttttgtcaaccaccaccgctaccggacctcggtccacgagtcgtcgctgcctgcgaccgcttcgagtctgcgatcgacggcctcgcgggcctccttccacgagaaccacaactcgctcagctcgagtacgcccgaggagctcgcagaggctcacgcgcggcacattgtcgccacccgctgggcaaagcggcagacgtggggcaatctcgtgagtcgggttcgattgtgttccctctgtcaggcgccgtagctgacgctgttcctcgatcgcagggcccggtgtcgatgccgcccaacccgcgcagcaagtcgtcctcggtgctcgaggctgtcgatctcacggcggcgaccgaccaagagtttgccgggtccgacgacaagagagccgccgccggctcgtcctcggccttggcgacgccccggtccgacctcaactgggtcaacctcgacttctcggccgaggtcgagcggctccagcaggcaaaggcgcgcaaggcccagaccgagatggactcgttctcgatgccgctcaacccctcgacgacaacggcagacgagcccggtcgcttcacggaatcgccacaagacacgagcgacattacgcctgacgacacaacgtctttcgcaccgacaatccagccgccagccagcgccacgtcaaagccggccgtgtccgaacatggcctctcaactgctccgacgtcggccacaaactccctctccaaggctagcggcagcaccaccgttagccatcaccgacggagcttgtcgctgcgctcgtcgctcggctcgtcgctcggcaaggcgcccttcagcctcgatgctggcaagtcgagcccccagcggatgagcacgctctttgcgcagccgcgcgtcgtttcgtcctcttcgactatctcgcgcgagagcgtcgaccaccggccgcggcgcaacatcagcgcaaagatcgacggttggtggaagtcggttgtcggcaacattggcagcctcaacacgtcggccgtcaagccgccggcgcaccactctacagtctctcaccaccacctgccgctcccgaagccggccaaccttccccgagtgccgccgaccgttgccggggccgttccttcctcgccgacgccgaccgtcggctttgcacctgtcgccaaccccgtgccggcggcggcgacgacatcgctcaagcacgcaacgtcgctgcacgagctcgcgaaccctttgctgatgccgcccccggtccggcccatccgagcgcacaccgaatgtgaggcagcactgccggtaggccgccggacctcacgctcgagcatccagactatcccggcgccgagtgcgccatcagagcaatcgctcgatgcccggcggcgacagcctgcgctgcacctgcgcctttcacagcagcaggggtcgtcggcgacaatcgactcgccgagcgaatcaagctctggcgccgaacggggctcttccgtccggcctcggctccggcaaacggcctcacggtcctcctcgtttggaacgacggacgacagccccgaacactcgtcgcggcaagtgcggaccgtctcgaattggggtcagagccctggggccttgtacgccgtccttgccgacgacggggccgagacgccgccgctcggctacgacgagctcgcagtgacgtcgcgcgagttcaacaagccggcggtcaaccggcaggtcaaggccaaggtcgcagcagagaagaaggactgcgaccggcggctgaagaagatcatccacgagattaccgtctttgtcgagcgcaagctcgaggaggccaatcgagtcgatgacgggcccgaccttgactcggccttgctcgcctcggcgatggacagccagagcgactttggcggcgacgacacgcccgaacgcttcgacgccccgccgatgcgtcgccgttagttccttcccctccgacctacttcaccagcttgcgcttgagcctgctgaccatctctgcgacctcttctgcgccagggcaatcgtcacggcccgcttctcgtcggccgtccgtctcgtaccctgctgcccaaggcagcccggcccggcggatcgagaatctgccgccggctgagctccgcagccctggacgacggaggccgagcatggcgatcgcccggccgcagccagactaccgcatcccgcgccagctgggcttcggcgatgacccgatctccaatacgtcgtcgcgctccacctcgcgctcccgctcaccgatgccgcagacgatgctgtttgcggcggtcgatacgcccgcgaccgacgagcagacgcagctgcccaacctctttctcgcgacggtccaagcgacgatcgacattgcgaccgaggtcctcgacacgccaatctcgaccttcatggcccggccgggctcgtgccaggagtatgtccagcgaatgatcgacattcgcaacgtctggcaggagaacccgcagtggcccggccgcgactggtacgtcttgccgcgagccgatgcaatgagagcaaagcagtggaaagtgacctcctttgccgcctctctgtgcaggtacggctctatgctgttcgccatctcaaatctcgcccgtgcgctcgagtggtgggccgaggaaaaggtcttttgggactttgacgacgacgagaatgcggatccgttgacgtttgtccttcggccgccgccgcgcgtcaagtcgcctgcgatgatgctcccgccgccgtcgagcttcaggcggtcggcgactacgctcgggatcgacctacagtccggtgtggccacgccgtcgagcgtcgtctacccatcggtcgacgaggtcctcgacggccaccgggacgataacgccgaagcagccggcctcctggcgacgtccgaggtcgagcgtaagctctcgacgggcgagggcgatctccacacgcaggtcgagcaggcgcgcatgctcaacgtcgtgctcgagctcggtcttgacggcaacaaggtaggctgggtcaacccggcctggaagaaggtcgtcggcctcgaggtcgacgacgtcatcgacaaggactttcacaagtttctcgcccccgccgactcttgcgtcgtttcggacgcgagccgagcgctcatcgacgacgtcgacggccacattgcccacgtccgctttcggatccaggtgagtctgcctgcgttgatcgccggctgagggttgctgcaggctgaaccgtcgctcttctccgcagatcatcccggacgcggtcgacgtccagcccgatcgcgagcccggtcccgtctacctcgagatggagggcaccggcatgcttatccgcgacgtgtggggcgagcccctgcatatcatgtgggtcgccaagccggtcggcggaacctacgccgagaacccgatcgacgagctcgaccagggccagccacagacaccgcagggcctcggcttccaccgccggtcgtcgacccagccggtgacgccctttccgaccggcggcgccatctcgacccagatcctgctctgccggatctgcgagcgagacgtccctacctggtactttgagaagcactctgagacgtgccacgagatccaccggctcgaggccgacatcagcgagcagaacgaccgggtcggcgacatcctcaaagcggccgaggccctgctggcgatgtacgagccgagcgaacggccggcgacgccgacctaccggggcacggccgttgcctcgcgactccagcacactctcccgctctcgccggccgcgactcgtgccgctcaaaacgctgcccagtgcaacctgataaagcacgtcatccagaatctccagacgtgcctcgagctctcgacgccatcgctcaaggacgagacggccgcgctgccgatcgaggagcagcgtctgctgtcgccccggtccgaagagtacatgtcggccctcagcgtctggtcccggccgcagaccgaggatgcggccctgacgaggctcatcgacgactgcatcgccgtctgccgtggtaaggtgaacgcgatcaaccggctccgcaatacgatcgtctactcggagcgcgtccggcgcgagtggcaggacaaggtcgaagagcagctcgctgccctatctgaggaggagaacgagtcgtctggctcagaggagagctcgtcggcgtcggccgaggatccgtccggcaaggccctgccgccgcctcaggccgaggaccgaaccgagcggcggccagtaacgcttcatttgatggtcccgaccatcgccgggcccgagtcaagcaggtcgccgtcgtgggacggctcgctctcggcctcgccgatgccatcgcatgcagagactgacgcccggcggccacatcaccaccggcgtctctcgtcccggaccgactttaccgacctgtcgagctcgcccgtcctgccgtcggcgttcgaggcctctccgacgcggattcgcaagacgtcgggccggctctcgatgagttcggacgccgtgcccttgtcgccacgactgccgtgcatcaccccggcctcgcgctcgacgtcgatctcgatcaaagacttcgaaatcatgaagccgatcagcaagggcgcctttggttccgtctacctcgccaaaaagaagacgaccggcgaccactacgcgattaagattctcaaaaaggccgatatgatttcgaagaatcaggtgaccaacgtcaaggccgagcggaagatcctcatgaatcaggccgagtcgccctacgtcgtccggctgttctttaccttccgtgcggcacctcttcgcccctcgactcgcttcattcccgttggatgctaacgctctttgcttcgcaacacccagagaataagcactacctcttccttgtcatggagtacctgcccggtggcgatctggccgcgctcgtcaagatgctcggcacgctcggcgaagaatggactcggcgcttcatcgccgaggtcgtgcttgggctcgaggcgctccacacaaagggcgtcgtccaccggtccgtccttcttgttccatcggtctggttagggcgacaaggttcctgacgactctcgatctcggcttacagtgacctgaagcccgacaacctgctcatcgacaaggatggccatctcaagctcactgatttcggcctctccaagatcggtctgctcggccgccaggctggcggctcacgcttcaacatccctcgcggtcggcagcacggtggccgggccgagggacggcacgacctgaacgactcgccgccggccttttcgccgggcagccaggtctcaggctcatacgcggccttttcgcagtcgtcctacttcaacgacggccgccagtcgggcgaagactcgagcgggtccgactatgcgccccgccacaagcgcaacacggcccagacggcggctatgggcgtctctctccagacggcactcggcctcaagtcgagcgcagagtcggagcacacgccgctcatctccgagacgcacaagtttgtcgggacggtcgactatgtcgcgcccgaaagcatcctcggtctcgctaacggcgatgatgcgagcgtcgattgggttcgtccggcgacgatcgcctcgtctgtagttgtgtcgctgaccgccctcccctccggccccgtgcagtgggcgctcggcgtcgtcatgtacgagttcctttacggcgtgccgccgttcaacgacgagtcggccgagaaggtctttgccaacatcacctcgcgccgcatcttcttcccgccggacgacgacgagatgcagacctcgcccgaagcccgcgatctgatggagcggctcatgtgtctcgacgcccggcgccggctcggcgcacatggcgccgacgagatcaagcgccatcccttcttcgctgggctcgactgggacagcctgatgacgacaccgggcccgttcgtgccgcagtcgacggaggacgtctcgaccgactactttgacgctcgcggcctgaccgacctcccggacgagctcaacccgacgctggcgagcgtcaacctgagcgcggcgaccgcagacgatccggtcatcgccgccctcgccgacgactttggcgcgttcaactttcgcaacctgtcggcgagcaaggcggcgaatgacgaggtcctgaccaagatcagtgcgtcgcgtcgcgcttctcgcctcctgtcgtttgcggcagcagaactgacattctcttcgccgctttagagcaagaggccgagacccagatggccatgtcggagccgacgtcggccgtcctccggcatgaccggcgcaagagctcgagtgccagtcgaatgcgcggccgcggccctccctgggtcgatgccaaggtgcgtcctctgctcgaccctcatctgccttcctctctcgcctgacattggctgttccctcgccctcgcagactgcgctcggcaacccaccgtcgccctcaacctcgacctcgtcgagcgcgtccaacccgatgacggtcgccgcctcgggcttctggccgcagcactcgcgccggacgagtgacatggagcgcgtccaagcgtccgagtcggatctcttccggcggtcgtccctcccctcgcggcttcgcgcgagctcgacctcgcaccagtcgctcaacagctcgccgacgatcctcagtcctccgtcgagcgtcagctcaccgcagtcgccgagccgcgaggtgtcggtcagcaaggtccaggctctcctcgccgacgaaaatcggtacgtttgcctgctttcgagctcgacactgccaccttctgacgccgcgtctcttccccttgcggcacccgtcagcgtcagccgccaggtcgccaagaacacgttgaccaagctcggcatggagattgccgaggccgccaatgggtcagacgcagtcgccatcgccaccacctgccgtgcgatctcttgtcgtccttcgaccctgctgccgtcgctaaccgtactgcctttgtctttcaccagcctttgacgtcatctttgtcgacgccggtctccgagacatcaacggcgacggcgtcgcgcgctacctcaagtcggtcaccggccccaacagcgagaccccgagtgcgttttgcttcagcttgtaatgacagcatgccctcaccagcggctgaccttctctctaacttgtcgatgcagtcgttgccgtcaccgcgcaggccgaagacgatgcgcccccgccgtccgaggagggcacgctctttgccgccgtcctcgttaagccgatcacaaaggaaggcgtccgggccatcctccacaagctcggattcatcgaagggatcgccgtctaggactaccgaccttggtcccctcatcaggaccggaccctatttgtttctctcgacggcctcgtcaacggccgcccgcccgtgcaaacccggcgaggcgcctggctcggccatctcttttgctcccctcttcttcctccatctccttacctcccctttgcatgttcctaaacagctgtctgtttccttcacctgtcactcctcgcccctcttacagcccgccgcacactcacccatcttagcaacccccgttgtcttcgcgcctcgcaaaacccacacatcgtgtaccaacagccacttttccatcctgcctgcactatctctcccctagccttcaccctgctcgtctttctgcctcgacctttcatcgcattcgacgcctctctgctgttgcagcccttacccccggttcttcaccgcccgttgtaccacgctctgcgctctcgcacgcttctcacatcgcgtcggggcgcgtctcgtcagcgtgagagggggcaggacgacgagactgtctccggcagagctcaaagtcactttgaagggcgtcatagatgcactccgtcgtcgtcgtcgtcgccgtcgccgtttgcaacaggaggcctcgacccttcctcgcctgccggatccaaaggtcggctcggccggcctgtcgaagtcgacgtcgacgtgaccacctctgccgggcggcgttccgcttcgtcgtctgtcgtcagggcttgccgcccatcaaccccctcgccttgaccgccgaagcccaccgcttcgagccctggcggagggcctgtcctcgccgggcccagctgatgaccgccgaccatcgcgctgggctcatagggcgtgtcgtcggtctctatcaacgcgtcgccggcgtagtggccggctgaaggagcgcctacgtgtcgcgcgagtgcccattggaggatggcgatacgctcatgttggctcgctctggagacgcacgtgaaggaggagagggtaggagtcagtcgctagtcggctatgagcgagctggcgcgacgccgacgacgccggccgggcgaatacatgcccgagaacatgcagccgacgatcctgagcgtctggactgacattgttcgctcattctcgtcccgagcagtggcaatctcccggtcaaagccctcggcagcgagaaagtcgcgcagcgcgtcgttcgactggcggaggtggtcgaccgagtgccgcagccgggcaacctcggccgtgatggtcggcgggtcaagcaggagggcttcttctggcgagaaggggtgggtgtgacgcggctggaacattgctgaatgctgacaagggccgaagaggagagcagcagggagtggggcgtcagccagaaggcgaggaggagctggaagggcggacgcaggcgaggtccggctgccggcgcacgagcacgacgtcgtcggcgatcttgagggctagacacgcacctgctggctttgccttgctagtccgagcagagacaaagaaagggcgagggtaatggtgagcaggaaggagtggacgagaacgagcagcagagagggccacgtcgccggtcgccgcccgcgcagcacgagcctcgggtcgacgagagtcggctctttgccctcctgcaccgacctcgcaatttcatagccgatcttcaatattcgatccttactctcctcttcctttgcacggagtctctgcagccggtgagtagagggacgacggagaccaccttgacgagacgggatgacgtgcactcgcgcagcgccgccaggccatctcctccctccctctgctccgttgcctctgaaggcccgtgccctaacctacctgatcaactcagccaagtccacgtcgccttcctccgtcgcccgctgtcgacctcccctcggctcagaatgaggtacatcaccccgcaagaggccgcccatatcgatgagcagctcatgtcgcccgccggcggctttgcgctcgagcagctcgtcgagctcgccgggctcgcgtgtgcaaccgccgtcgctcggtcgtttcctgctcccaaagaagaaggaggcctgcgggtgcttgtggcagccggcccaggcaaccaaggcgccgacggcctggcagcagcccgtcacttgctccactttggctaccggccgacggtctaccttccgaaggtgcgtccttcgccggtcttccctcttcaacagcttcaggctgacagcaaatcctgactccagctcggcaagaacccattctacgccgctctcatgacgcaatgcaagaatctggccatccccgtcctgaacggctcggccaccgagtttgagacggctctcgcctcgaccgacgtcgttctcgatgccctcttcggtttctcattcaagccgcccgtccgcgcaccgttcgacgccgtcctctctctgctcgccatcacggacgtcccgatcctgtcggtcgacatcccgtccggctgggacgtcgagcacgggccgctcgcagatgcaccgaccctcaagcccaaggcgctgatcagcctgacggcgccaaagcgcggcgtccgattctttgcgggcgagcagcactggctgggcggccgattcgtcccttcgtcagttggttgccttcccctttgcgagacgagcggtcaagacgctgacagcgagcgtgcgatggttcggcgggcggccaggcgcatggcagaggagttcgcgctcgacctgccgcgctacccgtcgacggatcagatcgtcgagatccccgtcctggccgagaaggcttagcgtgtcttcatattacctgtgcttacgatcgcagcccccgacgcgacgctgaaagggtcattcacagagagggggagccgagcccaaggacccccgcatcaagcggccgtccaccagccgtcgtccgactcgtccggcggcttgactgtcactggtcgcgacatgggcgtcgtcccccgtgagggtgagtcccagctcgttcgaggctgagggcgcggagcccagatggaagccatggaacccttcggcgcgtcgctcgtggccggacgcgcgggtggaggggaggtgacgccggtcggcaccgttgccgcaatctggtgtgagggccggagggttgacagaggtggcgagagcggccggacctgatcctgcagatgccggacgagagggtggggcgacgtccaggacgaggcctccgaaggcggtcgatgctgctgctgctgctgctgctgctgcgaagcgcggggcgtctcgggccgggtgacgcttgcttgctggagacgttcaaactgcgcccgttcaagggcgaggccgttttcgagctcgtcgattcgcttctcgtgggtatgctgctcgatctgaaagagagggggacgtgggacgatcagcgccgaggcggacgacttgtcgggcggctcgacgacgtacctcggcagcctggagcgaggaggtgagcgtgcggacggtcgactcggcctcctgaagcttgagcgaagcgttggccagcgccgtcttgctcatggcggccgaggccgaagctgcgcgctgctgtgactggagcttttcctcggaaacggcgagctgcgagaggcgacccggcgagtcagccacgaggcttccatcgaagcagcaaaaggacgacttacccgcttttcgagcgacaccagctgctgcgtcagctcacggttgcgctcctcggccgcgccggtctggtcaaaggacgtcgagagcgactcgagttgctggacgatggtcgactcgaagatgtctcgagcgtgccacgcctcgtaggccagactcttctgcgacttggtctcgtgctccagggtgtcgacctggtcgagatggtatcagcccatcgacggtcgctgagcgcaaagaaagaaagaagaatatgcgactgaccttggcccgcagcgtggcgatctccttttccttggacgcgaaagcaaccgcagcctcgcgctcgagctctttcgcgtccgcccgctcggcctcgaggcgcttcatctcgtctgtggccgttgcgagctcggccttgtccgcctcagctagctgctgcacgaatcgatgctcagtggcggaaatgaggagcgcctggacctcggaagacagccgggcgcgctcggcctcagatgcccggagctggtccgagagaagaacctcagctgggcttggggctgagtctcgctcgcggatggcagtcaagccttgcttcagcgtctcggttaggcgttcggcgagatcggtcggcaccgcccgcaactggccgaggtcgaccttgagttcttggattgcgaccgacacatcagagaggtcgacggccatcgagaccggcacggcgtcgatgaagcgccgcaggagaacctcgacatcaatgctgggcgcaggcgatggaatgacggcggacgaggtgatagcctccgagacgaccgagaggatgggctgttcgaacgccttgacgtccggtcggtcgcggtcctcggtaagcgcgcggcgtagagctcgtgcgacaacatcctcggtttggtggactgacttgaggtcgtctaggcggggcaggatgcgctcgacgatgctatcggccgattcggtttgcgaagcctcaatgcgaggaaggagggtgtcaatgacggccgccgtactggaagcatggtcgtctagacgctcgagacgcgtcaggacaacatcggtctggcggctctgcgactcaagtccgttagtgacagcttcccagagcgacctgggcggccaaagggcctcgagattctcgatgaccgatcctgccgaggacaaggttgccgaaaattagcggagagcgcaaaacggggcgacgaaatgaaggcatgatgcaccctcgagccgctcgcagacgacgcggtagccctcctcgactgcgtccaagatgtcgttgacacagtcggagaggccgttgacggcatcgcgctcctcaagcatggccgccaaccgaccgagcagtgaacgctcggcgtccgggtgcagcgaggcgaggtggatgatgccgcccctggtaccagagagccgtagcgagttgagcttgtcgtcgatgatcacttggatgcggcggacaagatcgtcgagatggccgggtcgctcggccggggcacgggcggacgacgagtttgacgtcggaccgacctcgctgctcgacggagggccgctcttcaggcgccgtcgcacggaggcgagcgagaactcgtcgtcatcggtgatgacgctgcctgcgagcgaccgccgcgcatcgtggctcggcgtgcttactgggatggcaggaagaggtcgagtgggggttactggtgcaacgcgggcactgagcgtcggcccagggggcgaaccgaagatcgggatcggcggccgctgcttgccgttgagaacgaccgtgtcagaacggcccgtctcggcgaaggctgcgtttgcgtcctcaacggcgattctcttgaccgaggacgtgtcaaaggcaaagggaagcgtctcctgctcttgagaccgctcggtcgagagcgagacggggccgacaggcatcttgaaggacgacatgcgttcgatcggtacgccgccgagacctcttgacgaccgtggcgacgagcgaggcgaggacacaggcaggtggccagtccggtcgccgtcgaagctgcttggctcatgcgtccgcgatcgcttcgttggctcaacgtcttcctcgtgacggaagtgttgagccattgcgggaggcgttggcagtggtcgtccgccaagactgcgagcaaccgggtccggcgtcgacaatgggagcgtcacgagcccttgtggtgtaacaaagcggtagggcgtctccccgttgctcgtggcgtcgtctgcgagcgcggctggccgagcgcgtggttggaactcgggagcggcgacgttgaagggccgcttggtcgagaggttggagattggaagcgacggcagcggccggtcgaagttcggcaaagctccgttgagggccgagaggaacgttggcgtcactgggttcaagccagctgcggcggacgactgcgctacagggcgtgggacggccgaaaaggaggagagcttgacaggagagcccagctgctccagctgatgcgcgaagtgggtcagttgcaaggcagctgcggtcgggcgaccaaagacgaaaggcggcgcgcgagggtcgaggttcagggctgcaggctgcagggcaggcgcgcggtcgctcgggcgcacgtcgtacacttcggtagcaaaggccgaatggcgagcgtcgagccgggccatcgccaagcgtgagtatgtgccggcatcgccctcgtcggacgggttggagatgatgtcgtcatcgggttcgacaggctgaagctcgcccagattgacgaaggagacgagtgaagcgcggcgcggcatttgcgaccatcgcgagacgtactcgtccgattgagtggtgagcgactcagccgactacagccgagagccaaaaggaagttcatcagccgcgagtctagcaaagtgcaagggccaagaaaagacgcacgtagcccgaggcgtccttccaaggctcgaggtggctttcgtcggtcacctcgactcgggagagtgcgtccggcgtcttgcgctcaagctctgagtcggggaagatgcctctccgtgggatcggagcaaggacgtgcgaactgccgtctttcccgtgtgtcgaggcgatcatcgcctcacccatttcggccagagcggccgaattgaggctaaacggtgacggcttcgacaggctgctgccgacggcctgaagcggccggtaggggcgcgcaaagacaacggacgcgactgatggcgaggaccgatggctgggccgggtgaaagaagccgaggttgggtagctgagcgacgaggtcgaacggtggtcaaagacgccaggcgagcgcgaggcgatgcttggagggaccagatgagccggcgggacgaggtgctgcaagcgttctcaaatcagcgttccatcctccggtcaaacagcaaagcgacgtcgacttacgtcttggtcgcctcggacgtcgatgccctgggcaagcatcatcgcctcgaaacgtgcctgcttgagcttctcccacgcgtgctgtacgagacggtccgatcgggtcagcgaccggccaactggcggaagcagcagacgagtacctcgaccgaccttggtgggcaggtagaccgcgacagctcctcgttcgacatcggcccggtcgtaatctgccgatggccagacctccttgctgaggacaaccggctgctcagcatcgacacttcccgcctcatcgcaccgcttgagcggcaaggctctgacccagaacggctcgttttcgccatctgcagcggccgaccgcggcagcctgacgactaccttcttcttgacgaccgcaggctcgaacggcgtcttcggcagtccagcagcggctgctcctccgagcttggccttcggcggcggcccaagcccaatcgagtcggtcgtccggtggccagcgccgagcttcctcgagcgcccgacagggcccgagccgatcgcggcagatggagctcgggccgccgggtacgggccacttgggaagtccatgcgggagggagggccagcgatcgcatgaaagggagcgaacggcgcgagagatggcgtcggccggtagaccgggtgagacggaggctgctgagcgacgacgggcgagccgtgctgagcggccgtgcgcgctggccagctggcagcttcctcggcgcaagaggtctggtagaggaaggccggagaaagctggggcccgagctgacgaggcgtgcttgagatggacagcgaccggccggcggccgaccggaggtgaggcggcgcgtaggcgagctgctgctgctgctgctgctgctggttggccggctggtgctggcccattgacaataaaggtctcagcgcgacctccgccggccgaccggggatgacgagcggagtaagctgttggtcgtcgcgaaagctcgacagggaagctgcaggaaaggaatcaacgggcggggccatcttcgtgggcgggtcgaggtcgtgcagctctgggtgagcgtcgtcaggtcagaggggcagccaggctgagtgaggccgggacgcggccttccctcctcctgctcagcctccatcaggcacgacagggagctccgggccgaaaaggaggacaaaagggggttgaagggtggcgggccgaaaaggtcgagtttcgagcgcaacgacgaaggcactcccggccgccccgcgcagcagcacaccgatggtcgtccccatccctcatttcgccgcgtcagaggcagcccgagcatggaggtcatcaagtcgtcaattcgtcgcggtcgtcaagccgtctgctgtcgctccctcacttctttgccttcttcttcttcttttttggcgacgtcgtcgtggcctcgcccggcccgggcattgacggcgggagcacgaccgtcccgccttggagctcgccgaggatgctgattgtgccaccgccgttatcgccgccctcggccgtggccaccgtagaggacgcagggtcggccgcctcggccgcctcggccgcagcaatcttgtccctcgcctcgagaaagaacatgaggtccctcagctcctcgtccttctctgcgagctgcgaccggagcgcctccttgtcgcgctcgcccgcgtcgacctttttgcgccagccggcgaggttcgttaggagcccgcggttcatctcgcgctcgccccggagctctttctcgagcctggcgatccgcgcccggtcgcgctcgcgctccgtctgcgaaagctggccctcgagctggacgatgcgcgcctcgagcgactcggagtgggcggcaaagtattggcgctgttcagccagctgagacgagagcaggtgcgagtactcgagcgcgaccgcctcgagcttttcgagcggcatatcggtcgggccgaagcggggcgtacttggcgtcgtcgaggaggaggatgacgctggaagctcgacgagcgaaccggtccctttgatcatgacgatccggtggacgtactcatcggcagcgtagttccagcagcgctgggtgtcgatctcgagcgcaaataggtggccgctcgacgcgtagtgcgcctgggcgtgcttgccttccgaatagcgaccgcaaccgatgttgccacagatcagacatatccagcacgactcggtcgtcccgcaggccgagcaggacgaggacgccgcctcggccgacgcgtgcgcggccgcgtgctggtgggccgagccgagagctggagggaggtgcagcggctttgacgagtagcggcacacagggcagcgcgaatccgagtcgccccacttgcggaggcaagcgcagctgcgagggtcgtctcttaccgtcagtgcaggatctcgacaagcattgatgagagcaactgactgataggtgtgcaggcaggggacggtgacgagccccgtcacggccgagtccatccgctcgaggcagacagggcatctgaaggagcgagaagaagcgtcaggtctggtccaacttagtacgacgagtctgcggacgcacgtcggcagctcaaaggcctcctcgagccttccatccgtcagggcgaggctcttgcgctctgagtcgagcacgacagggaacggccgactctcgatcggctcggccggcccgccggatgggtcaggcttgcgtgtcgcaaatggatcgctcggctgagcaaagtgggtgaggacgtgcttgatcgggacgacgtggcagcgctcgggctgcaaggacaagtagcggttccgtcagcgggttgcaagaggggcgagttcagagcaatgacgccgcctcgcacctcgaacgcgttgaagggcttgccgttgaactcgcggacgaactcgcccgcagcgtcggctgaccggagctggatgaggacgatcgaccgcgagggcgagatgtcgcggatcatacgcaggcactcgatctcggcctcgagcgcttggacgtacttgaggaagtcggccggcgagaagtaggacggaacggcgagtacctgggcggacggcaggacgattaggccttgcttagcgcaggcgaactttggtcagagcaggagacgaggactcacggcgagcagtgttgacgacgagccggtggcgcccgcttcggcgtcgagcttgacttcggccgtcgtaaagattgacgaggaagaggatagcgcaccggtcgaggtgttgtggttctcggacgctggcgcatgtcggtagaggtggacgctgccaaccgggaggttgagcaggcccgagctgacggtcggcgagggcggggcgtgggcagtcgtgtcgctcacgccgctgctgctctggcgagtcaggccctgtcgggctatcgtagcttgtttagtaggaaggtcgagccactcgactcgaataagaccctgctgtccggggtgagccgccgtcgtcgagggcggtgcgggctgctgcgggccagggtctgtcgcctcgagctccagggcacccgctgcgaccgatccggggcgcagcgtccagacgcccgcctgagacggttggtgggttggtcccagcgacgggaaatgctctgggtcgaggattgagggcagggccgagctggaactgggggcggcagcggtcgccggcgaggcgctcgggggaggaggcggcggcggcggaggaggcgccgagagcgagacggcgagcgagtagagggccggtctcggcacagctggagtcagatcccggcgctcgaagtcgtcggccttgggcaggtgagcgcctttgtcgtacgaggccatggcgatgcgatggagaggcgagaacgagaagcgagctgctcatcgtcgtcgcgtcgtgaggtgggaggctcggggccgacttgcatctgccgttttgccctgccgccgcgggaaatctcgattcgcaggctgcgcggccagagggacgagccgacgcttgctgctctacattccctcgtctgcctttgcctcctcctccatccaacagctcgcccaccgcctcttactttttagcaggactgccagctcaaggtcagcttgctcgccttccgcaggtccagtcgctcggccccgtcgctgacgacttgagctcgcaccttcgtcctccggcggacagcgcagcgtccctcctctccccttcgagctcttcgacgtcgccgaggcgcctcctgctcgagcttctcctccccttaggatgaagtccaactaccaggtcggtcgccttttctcgcttaccttgccagacgtcatgctaaccccttcggtccctccagttctcgaatctgatcggcaccgtctacaggcagggcaacgtcgtcttcacgccggacggcaacagcgtcctgagcccggtcggcaaccgcgtctcggtcttcgaccttgtcaagtcggtccccctgtctagcttcagagccttgacccttggcgctgatattccccctgcttctacttctccagcaacaagtcccggacgctgccgttcgagaaccgcaagaacattgcctgcatcgcgctcagccccgacggcaacgtccttctctcggtcgacgaaggcgagccgatctcatttcacaagagccgtgctgcatcgcctgaccacggctttgccacgcccccgaacagacggccgagccatcttctcgagcttccgtcgcggcgccgccctccaccacatcaacttcaaggcgccggtcaaggacattgccttctcgccggacggcaagtacgtcgtcccagatcagacccagtcggtaatgactctcctctacagcgtgctgacccctctttctttgtccaggttctttgccgtcacgcacaacacgcacctccaggtgtggaacacgccttcgcatctcgcgcgcgagtttgcgccgttcgtccttcaccggacttacaccggccaccgagatgaggttctgagcgtcgcttggtcgccctgctcgaggtgggcgcgcagtcacgatcctgtcggacccctgtggcgcacgcaagctgacgctctggcctggtctctcgcccaggtacttcatcacgacgtcgcgcgacatgacggcccggctgttcacgctccacccggtcgagggtttccggccaaagacctttgccggccaccgcgacatcgtcgtccgcgcctacttttccgaggacagcgagacgatctacacgatctcgcgcgacggtgctgtctttgtctggtcggccaagacggcggcgagcggcggtgacgatgatgacgacgaggccgaggaggatgacgagcccgagatggccatcctcgacgccccggcgtcgtcgtcgtcgacggcagcggcggacaacgtcgtcgcctacacgcgctgggggattgtcggccggcactactttaaccagccgggaacaaaggtcgtctgcacgacgttccacccgcagtcgtcgctcctcgtcgtcggcttctcgaccggcgtctttggcctctgggagatgccgaccttcacaaatgtccacacgctgtcgatctcgcaagagaagatttcgtcggtcgcgatcaacaagacgggcgagtggctcgtctttggcgcgaccaagctcggccagctgctcgtctgggagtggcagtccgagtcgtacatcctcaagcaacagggccactactacgacatgaacacgctgtcgttctcgcaggatggccagaacattgcgaccggcggcgacgacggaaaggtcaaggtttggaacaccaactcgggcttctgctacgtcaccttcaccgatcactcgtcctcggtctcgtgcgttgagtttgccaagcagggccaggtcctctttacggcctcgctcgacggcaccgtccgggcgtacgacctcgtccgctaccgcaacttccggacgtttacctcgccgacaccggtccagttctcgtcgctcgcggtcgacccgagtggcgatgtcgtctgcgccggctcgctcgactcgttcgagatctacatgtggtcggtccagacgggcaagcttctcgacatcctcaccggccacaccgctccggtctcggccctccagttctcgccgactggcaaccagctcgcctcggcctcttgggaccgctcggtccggctctgggccgtctttggccggtccaagctctcggagccgtttgagctcgggtcagacgttctcgcgctagccttccggccagacgggcgcgagctcgccgcctcgacgctcgacggccagatcgtcttctgggacgtcgaggattcaaagcagacgggcgtcatcgagggccgcaaggacatctcgggcggccgcaagcaggacgaccggacgacggctcagaattcggcctcgggcaagtcgttcaactcgctcgcttacacggccgacggctcgtgcgtcatcgccggcggtagctcaaagtacgtcgtcatctacgacgtcaaagacggcgtcatggtcaagaagtatcagatctcgcagaacctttcgctcgacggcacgcaggagatgctcgactcgcgcaagatccttgacggcggcatgtcggtcgacgcgatggacctccggggcgacgagtcggatctcgaggaccggctcgacaagacgctgccgggcgcgagtcggggcgacctctcaaagcgacgttacaaacaggaggcccggaccaaggccgtccgtttctcgccgacgggccggtcgtgggcggccgcgtcgaccgagggccttctcatctactcgctcgacgacctgctctcgttcgacccgttcgacctcgcgatcgacatcacccctcagtcgctgctcgcgacgctcgccgaccgcgagtacctgctcgcgctcatcatctcgttccggctcaacgagaagcccctcatcctcaaggcgtacgagtcgatcccgccgaccgacatccggctgctcgcccagcaactgccaaaggtctacgtccccaagctcctgcgcttcatcgccggccatgtcgaggcgagtccgcacgtcgaatttgaccttctctgggtcggcgctatccttcgcgcccacggccgctggctccgtgagcgcagcggcgagttcgcgagcgagttccgggcgatccagaagggcgtcgccgacttttcacagagcatagcccggctctgcgacgacaacgccttcagcctttcgtacatcatcgaccagcaggcggcggtcgaggccaaggccggggccgacgccatgctgctcgacgtcggggacgacgctgggctcgaggagctgtgatgcagatggctgtctgtagctgccgtgcgacgacgttcttagagccagattggcagggtcgtcagcagctgccagcaaggatcaggggccaaatgagaggtctggatgaggtgccaaagagcggctgtgacgtacgcatctgagggagggcgacgattacaggcgtagtacgtaagccgaatctgcacgccctccacctgtcgtgcagtcgttgcaccctcgcccctccgaccaccaacagcccaccctctctcaccttctcgtcatggccagcatcaccccgctccgccgcttggcgcccgtcctcaacgcggccctccgccagtcgtcaaaagcagcaacgcccgccgtcgccttccgccgaccagctctcgccgccggcgccgcgctcggcagtcgccggccgttcgcccttcgtcctacgaccgccctatgcgaagagccaacgtcgcgcctgccgcctccatcatcgtcggcagcagaagcggctatcggagaacgaggtctcaaggcgaagtgggtgccggcttcggatgccgagtcgactcagcagcccaagctcgacgtcgtcccgaggttgtacgtctgcccctcaccctctctctactcgtggctctttcgagggcgaggctgagggcgacgacatggagctgacgcgagacgctctcttctgcacgactctctcggacatttccaggcagatgacgtttacctgcacggctccgctccccgtcgtcgtcgaggagacggttgtcgccggctcttcgtcatccttggccgcgcccgaagtcgagccggtcgaaccggccttcgccccctgctcccacaggtcgacacacaccttcacccgccaggcctacacgaaaggcacggtcctgattcagtgcccggcctgctcgaaccggcacctgatcgccgatcacctcggctggttcaaggagctgactgaggaggggaagggggtcgacgtcgagggaatcttgagggcgaggggcgagaaggtccggaggggaagcgttggaaagggtggggacgggacggtcgagttctacccgactgactagaggggtcgacgagccgtcggtagccttcgctgaggatggcagatcacactcgctaagctcgacgagtcgcccgccgcatcggcaagcgaccatatggtcagtcacggtcctcgaccgagatgcactgccgctcccaggaggatcgctgcctgccatcgacggccattcggatcgaacgccagcttcgtggggatcgctcgctgtggttgcccgagatcgccccgtcccgcgggcgccaactatcgacggccgtcggcgaggcggcgacggccaaacgggagacatcgccatgacccgtccggccctaggctcaattgatgactcaattcaaacttgggttcgtcgcaagagccgctcgcgcccttcaggcagagagtcaaggtcatgccgatacaggcgccgtgtggggcgcaatcttctcgtgaagtacctttggcgtctggagcgccagctcttccgcctgtaaccgcctgacagcctgcgggaccagagagacggaggggaaggtcagcgaaaaggcttgggcgccgacatgatggatgcagagactgaccgcctccagctcgaacaagtaggtatcctggacaccgtcgagctggtgcacggccttcgctagctcgaacaagtagtccttgttgctcccacttgggccatggcacaagtgaatccgccgcgagaggacgtcgaggctctcgctcccgacaaaagcctcgttgtcgggccggccgatgtagacagtgacgtttgagagcgcaacctcctccttgccgtcgacgaggtggtagaggtcaatctcctcgcaagtgtaaccattcttctcgcggtggtcgaggtcgtcccgaacctcctgctcgtgcgccggatcaatctcgagggcgacgccccagacgcgaagctcgctctcgtcgtcggcgccgtgcgtctcgcccgtctccttctcccagtcggccgctcggacgagcgtaacaacccggcctggccgctcgggcgtgccgcggtgatcgtttgagctctgacagaagcgccggatgtagggcttgacgtagccctcggctgtgaggcaggtggaaaaggcgcaacggtcagcacgcctggtggtggcagggaaccgcagcagctcgaccgacagaggccgttctctgccaaggctcagctcgcgaggggcccgcctctagcccagagctgctacagcagcacgcatcaccgcgggtcgtccaggctaagacagggacacacttcgagagatcgtatgcggcggcggcctgcgctcgagcgaggatcggagggagggggatttggtggttcagcccacgccacccgagcgtcggctctcgccgccaactgctagttgaacccaggacgcaccggaagatgagcgagccgtagccaaagacgtagaagaccatacttgctgtctagaagggaggcgctgggtgctgggagaggtcgagtacgtggtgaaggtcggcggtagtgagctgagccctcgccgatcgagcgccgacgaaagacgcgtgtctctgcgcgggcggcacgcgcacgatgatccggcgaagtacgcatggaagcaaggcccacatatctgagtcatcaactgagcgcagcggcaggtcgaagggcgtcaagaagggcatggacatcaaaggcacagtcgtcgtggaagcgagagagagcggtgtgggaggacagcgggcgagagcggtcgaatcgtcgccgccgagctcactccttgcaaacgacaacggtgcagtcggcgtggctcagaacgtaggacgagacgcttgcggcagaaatcagcttctggaagcgcccgagcttgcgccggccgaggacgatcatgtcggccttgtggtgccgggcgagggcgagcaggctgtatcgcgggtcgccgtgcgcgacgtggagagctgggggagaatgttgacggacacgacgtcagctgtagtcggtctgaagctgagagagaagccaatgatactcactgacgtcgacgcccttggcgacgaatgcgtccgccttctcgcgcaggtgcttcatcgcgttggcactggcgcaaggcaccgtcgaaagagagcgtcagccgacgaaccctaagcaacgcattggaagggagagactcacttcatggcccgaagcagctcgacatcctggccgagcgggtactctggggcgaacgagagcatcgccgagtcgagtaggaacgccggaaggaccgtcgcgatgaagacgtggtcgcccttaacggcaatcttgtgaagcgtgtgctcgtaagcaagctcgccatcgggcgtcgtgtcgtaagcgagaagaatctgtggcgcaaaatgaacgtgggtgtgggagggcttggaggtaggttcaagccgtcttgacgaaggggtcgaaagggagagttgagcagtgagagggaaggacgcacgcgacgctcgccagaagcctcggtgccgcggacgtggacgaccttggaccaatcatttttgtctagcggcgtctcatgccgctcgatggcgggcgcgaggtcctgctgagtgaggcctgagggggtcgcctggcgagggtgggccaaagagaaggtcacgtcagcgggtgcagacgagggcagggcaaaggcggggagcgatagacgttaagggtgtcgtctgcaaggagatcacaagccgacgtcagttggctcgctcagaagggcgcagtaggccacgagtggacgcactggtcatgtcgaggcgtcaggggtgcttgagggagagatgggctagggtgctgttgctggtggatgggggtggtggtcggtcagagcttgccttctcatcaagctctcttcttaaagggctgctgctgcgtctcacgccgcggggtcatgcggctcgtgacgttgatcaggttcagcagctggaaggaaggcgaaggagttggacgacgcgcgggcaaagccggctgccacctgcacgagctccggccgggccgtttccctcgagccgactcttttgtcttaattgcatggcaagcgagtctgatgcttcaaaccctgccctcagcacgagctggttttgcacaagggtggcgactgtcgaggagacgaggctcgaggtgcgacgggccgaccgattctcgccgcgcagcaaccgtctgcactaacatgcgctgacgacgcccgcctgggcgaggcgggctcccggacgcaagagcaggacggcccgcagctaggcagccagtcgataaggaatagggcattcataaaaggaggcgtgagagcgacggggcttgctaagcagagggaggcagtacgggctacaaaaggggaagcggtccaagtacctcggtcgcaccgccacccctttcttccctctcgttctctctaccgccggcaccctctcccccgcctctgtccccctcttcgaccactggcgcgccctcatgccgtcgtacggtctcttctcccgcctcctctccctctcacttctccgggcgcgtgctcgctttttcgccttctaagttgcgctcccttcctctgcttccgtctcctcccctcgtctaactctcaaactcctcgcctcccgtccatagacccgcctttgtcattgcatgcccgttacaccctaaccctaaaagaacccgaacgtcggtgagttcgcgcctctgccagctctcatcacaagcgacaccttcaaagagcgacgctgaccgccaaccacaatctcttcttgtcaaagacttctacagcggcctgatctaccgcgcgatgggcttccctctcgactacttccccgtcctcttcactgtgcctcgggtcgttggttggctggcccattggcggcagagcatgctcgcagcggcggagggcggccttaagatctggcggccgcggcaggtgcgtgacggccatcatcggggccgattctacgcagtacgctgaccgcttctcatctgcctcatgaagctctacgtaggagccccggctcgcgactacgtttcactcgaggctcggcccgaccagacgccatccgaccccaaggctcacccgtcgaaggtgccctccctcctcatgcccaggcacgcaggctactcactaacacttctctcatttcgcaggtcccgcacgacggcccgtcccgtcgcacgcgtctcgcccacgaccaatttgagagcaagctctgatgcgcgctcctctgacctcttgtcttcctctgctagaccttctctgttacgattgatgaccatgatattcctgcccaaccgcctaggcccaaagcgcaaggacgctcatgacggtggcgcccgtcgcaaagcaaccgagggcgaacgtcaaacgaccgagtgaagcttttcgccaatagtcgttgaggatgaactgcctcacagataactgcgtcagtcaacaaccgtagcgtcaataaaaaggatctgcgacggacctcctgggcaatgagctggacgcaagcggaataggcaaggatgccggcgctgatgctgtcgagcacgccttcgacgatgatcgctgaggtcgaggacatgtcgatcgatgaccgggcagcgaggccgatgaccatcccgaggggcgtcgcacaggcgtagacggcagcgcaggtcaagggtacccagtcaaagttcgatggcaggcggaggaaggcaaagcgagcgccaaggccaagaccttcgaaggcttggtggaaggtctgcaggcgggcgacgggagcgttagggacggcggcagacaatctaaggacagcgactcaccaggacgacgagaagctgattgaactcgtccgtgttgagcgcgagcatcatgccgatgatgaccgagtgctgcggtgccaggcgaaccctgagtcagatcgcatcgagagcggcaaagtctagagcacgcacgaagatgatgccggactcgagcacggcaaggccaacgatctgcgcaccggctggaggcgcttgctcgtcagcgcatgactcagctacaggagcgagttgagggacgcaccaggcatagtctcgctcgagtcacgccagcatgcgctgctgctgtcgttgaggctctcgtcgaggctctgcttctgctcctcggtgtcactgaggttgccggcagcgactgggccgcagtggccgacagtgcaaagggggctgcttgcctcaatgccgagccgggcgagccgagctgagcctagccgataggcgaagagctcgaggacgaacgtcgcaaagagggacctgcagcgagtcgatgggacgtgtcagtgcgaggcgaaggcaaaagagaagacgacgtgcaacggacatgaggaagatggcgaatgcgaatggatactttccccagccgtcaggaaggcagcctcctttggaccggatgctggaggcacgagcggcatatcagcaaaaggcgcgctcagtgcttgagggatgggcgtactggtctgggttaagggcttcgccggcggcaggctcgagcaggtggatgaaggctaacgaggaaggaaggcagtcgaacgtcagcgagcactctgccagatcaagtctggccgacgcacctgtcgagaggatcactccgctgccaaagtacttgcatgcctcgaagacgctgccgggcacgaggcggcgaagcgccggcacgcggcgcgagacaagcgggatcatcgtgccgagcagcgatgtcacgaagatctagggcgggttggacgagagacctgtcagcccacagcgcgagcatgagctgctcgacaaggaaggctcacaataaagaggcccgcgacctgagtcaagtgagaggatcagtggctctggcgaaggtgagaagctaactgctgcgcccgacgcaccctgaagccgatgcggtcaatgtcgttcgtcgatgagcaggcgtccacaaccgcctcggcatcttcgtggcgaagcgagagagtcattctgctagggcgaaggggaaagaggaggtgactgttggtaggtagagtgcaaagagcagaagtgagcccgggcgagtaaaaggggaaggcagtcgtgaccggcccgtcctctctgcgggggtgacgactgtcgcggacccgcacgccagccttcaacttcccagtatgtttcgactagaattgccattgcaatttcctccgttcgtctattcgaaacgaatctcccagtcgctggcgatctcgaccggcgggttcttgagcgtgagctcgctcgcgcggccctcccgtcggccagtagcgtccgagcccttctgccactcgaactcgacagcgacgtctccgacagtgacgcgcctcggcgaagccttgagacccagtacgacgacgcgctcgacccggacatggccgatgcgctcagcccaaccgttcgtcggcgagtaggttgcgacggtcgaggtggtcggggccatcaggccctcgatgtcctttggccggtcgctcgcgaggtcgaccgagcggaggacggcccggccggcagtgatcgagctaaactcgaagccgcgccagacgaactcgccctgttggaaggcaaacgagtcgccgtcgtccgagtatagctctccccgggcggtgccctccttcgaaagggcgacgacgagggtgtaggggtcctgccacatgagcggcgaggcccggcggatgcgcgtccggatcggaatgatcgagcctccctggtggagaacagggacagccgagagcggcgcaacgtaagggatcgtccgcggcttggccgaggccggatagaggtggtgcgaaaagtagtcgtagtagggctgaagcgcgagagagtcgagggaggtcagctcgtaagccgcggcaagtaccagtctcagataggagatgcacctggttgtcggcgaggtagatctcggtctcctcagcctcctcctcgacgacgggcttcacgagcaggcccgagccgccgacgtagaactggtcctcgaggccaaagcctccggcgtcggttgggtggacgacgtactgcggcctgcgagaggaggatggagtggtcagccttgacggcttgatgagcgagagaaagggagtcggcgcaccggatgacggccgtgccgtcgacggcagcctcgcggaaggctgtgtaccagacgggcaagagcgagtagcgcagcctgagcatgtcccggacgtagcccttgtgcggctcctcgagcaggtacggctcgcggcgcttggtgtcaatgtgagcgtgtgcccggaagaagggcataaaggcgccggcctggtagaagcgaacaaggaactcgggtgtcgggttctgcgaggagaaggcaagcggcgtcatttgtcagtctcgaagcaagatttgccgagaaggggacggcactcacgccgaagaagccgccgacgtcggcgcccgagaagctcatgccagcaatgttgaggctgagaagcatcgggatgctcccggcgaggtgctcccacgtgccgaggttgtcgcccgtccagatggcgccgtagcgctgtgagccggcaaagaacgagcgcgagagaacaaaaggccgctggggcgggtcctcgcgcgcggtcagagcctgggccgtgctccgagcctaggtttggggacggtcgtcagcaagacgaggagcggaagacgagacgagccgagcagaggtcacgtacaaacatcatgccgttgatattgtgcctgcaagaacaaggtctggtcagcagcagcagcagcagcgaggtcctgcccgccggcagtcagacgacgacttacacgtcgcgctcctcccacttgccatcctgatgaagagcgtcgcgcggcatcgagatttcgggcccgttgaagacgctgggctctgtgcgagccggtcataaagacgaagggcgtcagaggctgcgcaaacgaaaagacacgcgagaagggaccgaccgttcatgtcgttccagatgaagaggttcctggccgagtcggtccacgtctcgaaccggaaaaggtcggcccaccagccccagctgcgctcgaggaagaagtcgacccagacggacgagcccggccagcaccagccctcaaagtcggcgcgcgagccgttgacggccgggccggcctgcttgacgacgaggttttgctcgacggcagagctgtagacgccgaacgagggcgagcgcttgatgtgcgggtcgacaatcgcgaccatctgcgcggaagcagggcgagaagaggagcgatcagcagccagcagcccacggacggagtgctcgggggcgcaccttgcgacccttggcggcaatctgagcgagcatgcccttgacgtcagggaacttcctcgcgtcccagtcaaagtagcggtgctcctcggcgtactcgatatcgagccaggtgacgtcgagcggccagccctttccgccctcttcgctcgctgcctcgtcagccgtcacctcgtcaaagcgcctgtcgacgtcaagcacgtcggcctggtcgaggtagttccaccggcactggtggtagccgagcgcccagtgggcagggagcgcgctcggccccgttagtctcgcatactgcttcgcgagcgcgcgcgggccagcctcagcccggccgcccgagaggaggaagaggtcgaggatgcccgactcggccatccagtgcgtcgacacgctgccgccgccggctgccgggcgctcgacgtcgacccacgtttcgctcgcagaaagggcgaggatgccaaccgagcccgcgggcgagtgggcgtgaacgagcgggatcgcgccgtacatgctcattggcgagtcggcgagatactcgaaaatatcgacgttgaagagccggtaggggtccgagaagtgggcaccgggcccgcgggtcgcagggagcgagagtggcgcggcgtgctcgggcaggccgtagaggtgcgtctggccggcagggaagtcgatgtcgaacgagagggcctcggggcctgcggcgcgagcggggaggagtcagcccagggtgagcctccctgcaattgagccgaacccacgcgggacggacctttcggcttcgagtcggtccacgtcttccacttctcctcccagaggtcgcgctcccactcgtctttcggtccctcgaaccacgagcggtcgactgatgtcgtcgttgccgacgcatcgttggcgagaaccgtctggccgtcctcgatggcggcggcgagcggctcagccggcgagctttttgcggtcgggtgcggttggaagtgctccatgtggaggaggccccggccgttgaggacgagctcgggctcggagcggtcggcgcggaagagagcaagcctcagcgggtcatggactagctcgagccgctgggcgccgtcaaacgagcttgaaaaggtgatgttggtcgagcgctcgtccgtgttgaggtcgaacgacgcccgcttggcaagcgcgccgtcgacgagcgcccagcgggccgcctcgtcgtagcgctggcggaggccgccgacctcgtcaagcctgacgcgggcaatgccgtcgccgacaatgtcgattttgagctcaaacgcagcctcgccctcggcgagcagaccagaccggacaggaaagacgaccgacggcggctcggccgcgtcctcgccggtcgcgacgagcgcgccgtggccggtgatgcggtaaggcgacgaccaggtgccttcggccgcggccgcctggcggggcgcgagcgagcggaggcgccggcagaacgaggcctggtcgcatcgcttgaagtcgtcggtcttgacggcgccggcgagcgggacggcgacgaaagctgcggccgcaaacggcaggagagggagcagcatcgaaagagacggtatagagggagagagaaggagatggcctcgggcgcgcgacgacaactgacgagtggcgagcctggctggctgcatcggacctgcgctcaatgcatcagcccgctgctgccttcggctggcatgtgctcgaccgccgtccttccttcccgccccgcccgaccaaccacgaccgccatcataaagaaagacacgaccagcgatggcgagtcgacaaagacagctggcatcggcttctttggctgtacacagctgacattcacttcctccctctcgcgcccgccagctcgaccacctgctcggccggccgtcggcctcgttcaagcggtcccaggtcgtcctcgtcctcgccttctggctcgccgtcgtcgtccggacgccccgcgacggcccgcgcgccctctatctccggcggctgagcaggctcctccgtgcgtctctccttctctcgcttggcgtctcggtttcgcctgctgtaccttgccatcgcgcattcgctgctgcgcggggcgggaagctcggcccgacctcctttgaccacctctcctgacccacctccctcttcccgtccgaattgcagagcgcttcacgccatggcagattgtctgcgcgacgctgaccgccgtctacgccctccggcacatcgccgatatcgtcggcctcggctgttcgtcccgctcgcttgcgtctcacccgccgcatccgacccaccggccaacagctgacctcgcccccctcttccgccttcgtctcccgcccctcttcgtctcaacccgacttcagcgcccgagccgctctcgcgcctctactcgcgcgcctactaccgtgcaacctgggtcgcgaccgccttcgacgccgggctcgcgacggcgatgccgatccggccaaagtggatccgcgacctcgccggctttgtgcgtgcccatcccgcttcccgctgcctcaagcttctcttcggctgcgctgacgctttctgcccgacgccggctgcagctcttcgccggctactacctcatctacgccaacgaggccgacgagaaggtgcgtgtctcggctccctcgactcgagtgtcacgtgacaaggacgatccgcccacgctcgtcggctgactcttactcgcttgctcctcttcttcgctccctcagctccgcaagttccgctctacggcgacggtcgagatgcttcggacgacgtgggagaagccgcttaacccctacgtccggctcatcacccggccatagtgcgtcgtctcgcctcccagcccgacccctatcgctagccgtcgctgacctctttatcccggctctcgtccgatccttctcagccggccaagactctcggtggtgcagacgctgctcgtcccccggcccgcctctggcccgcgcgccgcgctcccgcccgtccgcgttgtcctgttcttcgacggctcgcccgccgaccttgcgcacgtcgacgagctcgtccttgacttccccggcggcgggttcatatgcatgggcccaggctgccacgaggagcgcctccgcttctgggcgcgccgcttcgggcgcggtcagacgtctgccggcagtcgacatcgcgcggtcgtcagcgtcgactatggcaagagcccagagtatccctacccctgggcaatcgaggagtgcttcgacctctacctcgcgatcgtcgagtcgaacggcgccgtccttggcctcaagccagcggacgagggccgacaactcgagctcgtacttaccggcgacagcgcgtgcgtccctcgtctgtcgcttcccctgttgctcaagcgagcgctgactgggccttctgccctcccttctagcggtgccaacatcgtatgcaccgtcctgttttctctgctcgagaacccgctcggcaagggcgtccggcggccgaaagccattgtcctcgcctacgccgcccttgacttcaactttacctgtgcgtcgaacattgcctccttcagatacactctccttctagctgctgattcttgctgcgctctcttcagcctggatgagccaggagaatctccgcgtcctgcgcgaggagacgggcgtcaaacgccggacggccagcggggtcgacctctcgggtctcgaagaggccaaggaccatctcgtgagttgccctttcgccttgcacagcatttgcacactgactgacacgcgacccttttgccaggcccaccgctccccgcttgcggttgtgcacgacctcccgtcccgtcgcgcgccgtcgaccggccggctgatgcgcacaaagtcgtggtcgcaaatgcttggtttcggcgcactcgtctcgcctcggacgccgacggcaacggcagcagacggcggccactcggcagggccgtcggcgagcagcgaggggagccagcggcatcggcggtcgaggagcgtcgcgacacctggcggcgggggcttagtcggaccgctggacactgcttggccgggcgcagcttcgggcgccgacgctccaggcgaggccgacgacgacgaagccagcatcgatggtcgggcggaagagtggaaggcgcttcgcgagcgcgtacggacgccgcaagcgagtcggtcatccttctcgctcgccgctgccagcgcgagcgggcccgacgtgcgcttgcggacgtccgccgccgccgagcaggatccgttcgaccggccttcgcaggtcgtccggacgcccggtcgcaaagacagcagcagcacggccgaggagggcagcgccgatggtggcgaggcgcgcgtcggcacccggctgacaatgacgagccggtcgggctacttccaggaccgaatcatcacgccgtcgatggtgcgtcccatcgctctcgactgcgtccttctgccctcttgctaactttggaccttttgctcgaccggccagatgcgcgcgatggcgatcctctacatcggcccttcgcagaaccccgacctctcgaccgactactacatttcgcccttgctcgcgccggcccgcctgctcgccgactttccaccagtcctcctcgtctgcggcgagaaggacccctttgtcgacgacacggtcgtcatggccggccggatccgcgaagcccgcgcgcaggcggccggccgagcggcgagcgatgtcggcgacgaggacgacgacgagtgggtccgaatggagattatggagggctggggccacggctacctccagatggtcgcgctcatgcccgagatcaagggcgtgctcgagggtgcgtctggcccgtctcctttttgacctagcgcccgctgacaagtgccggcccaccttttgcagacatcgcccagtacatggacgacgctttcaccggcgccctcttccccacctcgtcggcggcgacaaccggcggcacgatctcgccctcatatgcaaccgcctcggccgtcgactcgcgctcgtggctcgcccgtctgctaggctggcagtcgaccgctccttcacccgccgagctaaatctcatcgagatgccgacgccggtaacgccaccgccctcggtcaacgtctcgccgccatccggccggtcgcgtgcgtcgacggcaagcaatggctcggtcgcttcgacgcaatacctgcgcgccgccgcgaccaccgacgaggacggcgagatgctggccttcacgccgaaacggctccggtcgccgcccctgcgtaccgttccccggcaagggatcctcaagaagccgccgccgagctcaattgtcctcccgccgccgtttacgccgccgctctcgcgtgagggcaacacgccgccgtcatcgtcgaccgctgcgaccgctgggctgcacgcccagccgaacgcgaagacgctgccttcgctgctcgctgccgctttgacgcggtctctgacgccgccatcaggcagcgccgcgaaccaccatcacgcttcgtcgtcgacggctggcacgccccattcgcatctcgcctcgacgacttccatcgtcggcacgcccgtcggcggcggcggcggcgcggccaagacgcttcttggcggcacaggcgccaagcagcgcccgctggcgattgacgagcgcgagctgatgcgccgccggcgggtcgacgccgtctttggcatggagctcggcggcggctcaggagggacggcgagcgccagcggtgcgggcggggccgaggatggctcaaagggcggatctgaggccgacgacgggatggccgacctgctgctttaagacggcaacggtgatgtctgtgctccagtatgccttacggattcacgtccacgaacactgcgactgacccgggcagtaggatctcccatttgctgtcttggaccaatcgagaggactgctggtatacaacagcatgagagaggcgtgctatcactcggcgtcaacccttgccttcttctctggcgcaggcttctcgtcgtcgctttcgccgctctcgctgctgccgccgaggtcgagaccgagcggtagagggcgcttcttgctcggctcagtcggggttgcggtagacgccggcagactggcagccttctctgtcgttgatggcgcaggcgctggtggtgtgggtgccgccgcagcggtcgtcgctttcgggcgtgctgccggggccgaggcggaccccttcttcttgacgatgacgccgggcgggaggacgcttcttgccggcttaggtttcggtttcgtcttgacgctgctgccagaggcgacgcttccgttcaacgcggctggcctcgcactgctgccgcctaccagggctggtggcggcgaccgttcccgattctgcgctctgcgaccgcaagacgccaggcaatggcagactggtcagctctcatccgcctcacacaaagagagcaggtggctctcaagctgcagaagagcaaccccagagagacgcactgccggaatgcctcgagcacgtcgtcgtctgcccgtttccgtgcggcctcctcggcatgccgctcgcgctggtgagcctcgagaaagttgacctcttccgtgtcgagcccgcggaactggttgcccatcttcatcttctcgtcccattgctcacgcttgacgtcctggagcgcagcaatcaaggcaaggtgaagcgtcgttggtcaacagtcaacgcgagagtagacaccactattttcgaccgtcctggtttgcccttcgacccagtcacgggtgctcttctcgagcggcgccgatatgaccctcggcgcgtgcagcgtcaatggcttctagacccgagcggttgagggtgcgcgacgaggacgataccccgggtccaaactctcccacgccggcgaagctcctgccaacgagacgcgtcttatgaaaccagacgagaacgcactttgttgtgttgcagtttctgagtagcgaccaggtgacagaggcacagtgatcagcgcctgccggatcccgacaccgtctccctctcggagggacgacgcgtctcgcggttcggctgccagcgtcgtgtcagcgacgcacctcaaacagcgatcgcgggtcatattcctcctcctggggacgtggtggaggcgcctctccaatcctggacagcgagaaggagagagagagtcagctagcacaacgaggtcgacgtcggcctcctgcccgacgagctcgcgctgcaggcaacgcaccgggcgtaagcctcggcccactccttgtccttgttggcctttgcctcgtcgaggtccttctgcgagacgaagcgcgaggcgacgccgccggtcgtgttgaggctgaacgacatggctcgagatggttgttcgtcgggctcggccgcctcggtgcaggctcgggtcgtcggcaccgcgggcggaagagaagccagcagggcggcagccctccgcccgctcgcagccactcttcccaccagactcccacaaccttctcctccctagcatattattcacgctgctcatgctcgccaagtcgtcacttgccgcggtcgcgaagaaggtgcgactctctctagtccaggttgagcgtgggcttgcgccccctggcggctgaccactgagctcgctcctccaccaccgcctcgccctccgccctctctttctgccctgggtcaggccgcctcccggccacaggttctcgtccgtgcgatcggcacctcgtcgggatcgggctcgagattgccatcgacccgtcggtcggcatcgacgacgccggagtcgactggcctcggcaagtcgcgtctaactgacgacggcctgtcgctcggcgactttgtccggggcgaccacctcgagcccgagctcacgacgctgggcaatacctcgcagtgcgtccaagaggtgcctacgtgtcaggcgccgagactgacgatgtcttcccctccgctaggccccgcctgccctccttcctcaagcacaagatccctgccggcggctcgtttgctgccattaagaaggacctgcgcggcctcaagctgcacaccgtttgcgaggaggcccgatgccccaacattggcgagtgctggggtggcggcggcaaggatggcgaggagggcaagaaaggcgcaacggcgacgatcatggtgcgtgtcgactcggcctggcgcagaggtgcgcgcgcagagatccagtgctgactctgccctcggcgccctacagctcatgggcgacacttgcacacgcggctgccgcttctgctcggtcaagacgtcgcgcgcaccgccgccgcttgacgtgatggagccagagaacacggccgaggcaatcagccggtggggccttggctacattgtcctgacgagcgtcgaccgcgacggtgcgttctctgagatttggaagggcaataccgtcgctgatgcacccctgcacctttacagacttgtccgacggcggctcggcgcactttgcagagacgatcattaagatcaagcagaagtgagttttagagctggcttttgtgtctagcggtcacggcgctgatcgcatctgcatcccgctttcagggcccctcacatcctcgtcgaggctctgactggcgatttcaacggcgagccgaccgacatcacccgggtcgcgctctccggcctcgatgtctacgctcacaacctcgagacggttgagcggctgacgccgtcggtccgcgaccggcgggcaaagtaccgacagtcgctcgaggtcctccggcgggctaaggaggtctcgggcggccggctcgtcaccaagacgagtctgatgcttggcgtcggcgagcaggaggaggagcttctgcagacgctgaagggtgcgtctgcgctacttatttccgcgctccttgactaccggctgactcctttccgtttctagacctccgcgccaacgacgtcgacgtcgtcaccttcggccaatacatgcggccctcaaagaagcacatgaaggtcgaccgttacgtcgacccgtctgagtttgagcgctggaagaagacggctgaagacatgggtttcctgtacgttgcgagcgggccgctcgtccggtcctcgtacaaggccggcgagttcttcatcaccaacgtcctcaacaagcggcgcgaggtgcgtgtcgagcgtgttcattgctctgcaggtcgctttgttgacctgacttgcgtcctttctttctcccgagcaggaggcccgcgtgaaggagcttcaggcaatccactcggacgccgccgcccacctccagttgtagatctgtcccgtcttgctttctccctggcttttagagcattctcacctccggcatgtatcaccattttgcatctcatggccccttgattgttcacgcctgctgaaaggtcatcggatggtgcagtgtcatcttcgccagtcgagctctctatgacagtttcttgtcatgctatgaatcgctttaatttgaaggcagcgttctctgcaggaagaatggatggacggctgatcaatcgtcctgctacgtaagcgatcgctttcagtgcgctgcgattcggtcgaccctgtgcagccaatcaggcgcgttgcatcacgagccctgacgcggcctagataagcgggagcggtcagtccaagggcaccatcgctctctctcttcctcaacccgtccttctcgccttccacctgccaacccaaaacgctcctaaaccactcctcctcacctgctccttccaatatgtcggccgtccccttgaaccgctccaagcctcacttcgtgcgtcttgaccggctcgctccagtggcatggcgtctttggccgatcgctgggctgacccttcattctcttccttccttttgacgctccagcgcgctccggcctgctcgtcggcggcgacgccctgcgaaggctgctcgtgcggcaaggccgccctatcgaacaaagtctggtcgttcaagccggtgcgtccagtcctctatacgaccgatagctcgccgatccgcagtcgcctgccgccgcctctccttccttcagccctcgctgacactcggctctcctccctctagatcgccgccgactgcgccacccggtccgagccctgcagccaggagtgcacgtgcggtcgctttgagcctgaggccgatcttgccttcaaggaggagccctgcgcgacctcggccgcaccctgcgctggctgctcgtgcggcaaggcctcggtcgcctaaggtcgccagccctcgctctcgaccggccttgggaccgacctcgctcgtccaggacttcttctttcctctcttttgacgatctacttccttgcatgcctctctctcctcctctcgccctgcatccctctgcttgtcctcttgaatgaccgcctaattgatcgctcgcttctgaggtcgttcagttgtgctcgtcatgtcgacgtcagtccgcaaaagagagactcaagagatgaggtagtctctgtccagttacgtgagctacatccatctgagggggctggctaccgcttgcgctcggctgcccacttgaaggcgcggccgctgaagccctcgcgtcggcgcttctgcgggccattctcctccatctcctcttccgggtccgactcctcctccggcttgacgctcgcgatcttcttcttgccacccttgcccatgagcgtcttctgaagctccatctctttctgggcctcggcgaggtgcgcggcccgggtcgtgtgcgcgctcagcgtgtggaggaggtgcaaccggtggcgctttgaccggaggacgacctcggcctgcgttggaccggcgggcgcagttgtcgtcgtcaatgacgaagcagccgacttcttcgccttctttgacctcggcggcgaggcccagccgaggtcgaccggcgcggcctcgctcgccggcaaggcccagccgaggtcgaccggcgcggcctcgctcgccggcagcggggtcgatgagctcgaggcgacggcgttggacaggccagatgctaaaggcttgtatgagtcgactgtaggcagtgcgtgaacgaaagcagtcagctggccggattctcaagcaaggggaggggagtgaagggggaccgacgctcgtcccggctgtcgacaaagaccgtcttgcggaccctacgcgagcgcgtctctttgcctttgcccttctggcccgaggcgagcgcgccgagcagcccagccgcctcaagcgtctcctcctccgctgcgcgcagattgcgctcaagcgcagcgtcgtcgccgtcctcgacgaggtcatcgtcgtcgtcgttggcgcggcgcgcgaacgaagccggtaggaggtccgtcagctgctcgagctgggcctttgtccgggccatctgcgagcgttcgatcgcgagctgagtgcggatatagttggcatcctggctcttgagcagcttgaccgtgtccatgtcgagggccgtgttgccgcgcgactggtacgcgacgcctccctgaagaccgaccgcggaagtccgaaggcagtcagcactgtaggctcgagtagtaatgctacgatgaggccgcacctgcgtcttgctcccggtcatgccaaagtagaactcgtccttgttgcgctcggcgaccttctcctgaaggcgcttgatccgctgcttcttgctcgcatagtcgcgggcgcgaaggacatagtccttgtgcttctcgagcaggccgagtcgctggcggccgacgagctgcgagcgctccttgtggttccgccggtggagcgagtctggcggtcggagagcatgagagttgcgagaaacaagagcggcgcgcaggcaggacgagagcaaggaggtggaggtggcgggaggagtcagcagcaggtctagtcaagacaccgcgcggtcgcagtcgcggtcgaccagcagtagcccagcgacgcagacggcaacgcactcttgatcgacgagccggccattgcgagtaagtaggggtggtggtgcggtcgggacggagcagcagccgctcggcgggtttcctgctgccgacctagggttacaaaatggcagcccgcgcggagaggcgagctccgacctcatcccgctcgcccgacctccaacacccaagccagctcaaaaagaaccctcttccctttaattccttcaggtacgagcccacgatctgcttcctctggtcggactgatcctgacgccttttcctcctgcagctctcacacacaatggtcaaggtcgaggaagtccaggacgcccacttcgaggagaacgagtcggttcgtctcctgctcgctcgtcatggcccaccggtccaccccgcccattcctaagctgacggccctcaacgcttgccgcacacaggactacgagacgtcgtcttcggccggctcggatgactcggatgccatctcgattgcctcgtcggcgccggacgagcccgagacgctcgccgagcggctctacgccctgcgcgacatggtcccgccctcgacccggctctcgctcgcaaagaccttcaaccaggcctcgagctgggccaagtggtcgggcaaggccgccggaaacgccgtctggatcgtcacgacgacggcgctcctcgtcggcctgccgatggcgatcgccatcgaggatgagacccggctcgtcgcccaggagaaggagatgatgggccagcagcaaggccaggccggcgtgcgtccgctttcctctttcgcctgcgtgtcgtagcaggcagcgcctgcttgcctccgaggggggcttcctgccgacaacacgagagagcgccgcgctgacttcaatcccgtcccatccagatgctccctcctccgtccggccagacgcagctcgtcccgcccggcttctagttcctctgcctttcctccgcccccgctcgacctaacgctgtattgcaatgagaaaagacacactgctcgaccaacactcgcccattcgctttcggcagtcgctgacagcactcggtgcagagcacggctgacgtccatcagatcgcctgcccgttcaagcggctttcggagcggagccagggacatgccgcggcgccgtcaactggctgacttcgagcaccttgctgtcgaccggctcgacgacttcgactggcgcgtcatcgagcgcgttgtcgacgagcctgctgagccgctcctcgactgcgaggccagtcacccagctgccctccgcgacagccgcgccctcgtcatcgacctcagcttgctccggctggacagcgtagaacgtcgggttggaccgcattcggcgcgggaggagcgtgtgcgcgagcagatcgagggcgtcccgcctggttttgatcgtccctcgtgcctgttcgctctggaggaccggcctgaggaggcccgaagccgggagggtcgactcgagcgggaggccggccgagagaaagcggaggtagggctcgcggtgctcggcctggcagaagagggtgaagctgccggtcgtcggcccgtcgcccgcggccatggtcgcgagcgagggcggaaggacagcaaacgactgcatctggaggacctcgtggagcgggtaggtgctgacctggcggtcgcgttgctgctgctgctgcggcttgccacagccggatgagccgttcgcgccgccgccgccgtgctggagatactgcgtgccaaggacgacgacgacgggtgcccggaccgggagcgaccagcacgcctcgcgcgcgacgacgagcacgcgcaggacgccggtcgcaaacagctcgaggacaagcgccgtgtcgcccggtgcgaggcccgggtggaagacgccgatccctcggaggagggcgttcgtgagcgacttgtcgcgaagccggctgctcagcgtcggctcgagctcctcggggttcatcgtgaggaagccgttgaggtccatgtgcgtgcccgactgggtgacaaggtcggccgcggccgagaggcagtggatgcgcgacgacgcaaaaaggatcgccggctgggctgtcgcccggacaatgtcaaaggcgggcttgatcatcgccttgttgagaatggccgagtgcggcagcgtaaacgtctggattgccgtcgcgagcgccgtgttgcggtcctttggcaggaagctgaagacaaaggccgactctgctccgagccatgtgccgacgtcttgtgggtcgttgagcgacatggcgagaccgatgacacgcgtcaggctcgtcttggcaacggccaagaggcgcgaggccacaatctcgtactgcgcatcgagcaggtggaggtcatcgaggacgacgagcgcgaagctctgcgcccagccgtcgaatgcagacgccgagctggccaggccagacgcaatggcgcccggaaaggtgaccgagatggacgccgattgtgcggtcgagggtgcagcctggaagtcggacgggcggaggaggaggttgattttggcggccttgccctgaccaaagcgcgcgcgaaggcggctggccaggtcccgcgcccagtcacgccgcgggacgacgaatagaatgcgagccgaagggtcgtcgcggatggcgcgcctggtcgagcgagagagaaggacgttagcttgctgaagagacgtaaagcaagaggcgatggggagacgcaccaggcggcaagctcggccatcgtcgacttgccagaaccgctcggcgcacagagcaggacgttctcctgcgcgtggtagatcggccagaagatctgcgactggatcgagttgagcgagacaacctcggggtaggctgcagtgagccgccggtcggggacgttcgtcagagggaggaacggcagatccaggagggccgcgtgggccgtgctcgccggtggcatgacgagctgctcgaggtcgatcacgagcacgtcctcggcgcccatccagtggtccgagcagacgcggatcgcgatggacggcggccggctgctcttgatggggacgacaaagtcgagccggaagttggacgtcgtcggccggagcaagacgttggcaaactggaggatctggctaccggtatgatcttcggcccaaacccagaaagggagcgacgagccgtgtaggcggtcgttccactcgaatgtccgctcaagccggaggctgacctcgagcaagtcatggcttaaaggccggagctcgtgatggatcgtgacggccgggaactgccgagccgcagtcaggagggcctggccgtgagtccgattcatgtgaagcaagacgccaaggtcgtcggcgttcgagttggcgaggtcggcgatcggcaggtcgtcagcaaaccggccgaggttgtagaggacgtcctgcttgagctcgaattgccggagcgggtggtcgtacggccaaagtcgcttctcgatcgctttgctgagcgagaggaggacaagggccgtcgtcgccgcccggcggctgagcgcaatctcgaacaaggcgcgtatgatccggccgccgttctgcaaagaaggtcgtgcaagagacaatcagtaagagtaggtgttggcgaggcggcaagcggagacaaacctgggccgagtacattgagtcggagacgagggcaaagtcttcaacaaagaaacgcgagacgtagccctggagcaggatgttgaccttgccctggctggtgtcggtcccgcccttgacctggcacgggatgatctcgtccatcatgaacttgagctcgggcacctcgttctcgcggacctggatctggtcaaactcggtcgacatcgcgagcattgcaaggacgtcggcctcggtcatcttgggccggaactgctcgttgaagataaggatgctctgcatgcggatgtctacgcggaggcaaaagaataggtcagaaattagaatgtgatcgccgggagggcagctcgggacgcacaatactttgcagcgatccggccaaggtcggtgatggtcagcttgccggtgacctcgtcgaaggcaaccatcttggcctcagtcagcttcttggcggcgagagtcacgagctggtgccgcttgttgccgagctgggggtcgtcggccgtgacgtcgtgcggcatgccgtagtagaacggattgcgtcgcatgcggacaaacaggtaggtgtagcccatccactggaccgcctccgagacggtcgcaatcgtcccgagcgcaatctcggcgttcatcgagtcgatcataccgccgacaaattgcgactcgatcggatgttgcgaaaggatggcctcgaggtagtgctcgagctacgcgcgatggtcacgtgtatcagcccgggcgacggtcgcacacccctctcaagactgcgggcgcaccttttcctgaggcgtgcagatgtagccgactccggatgtctcatagccaggccgaccagcacgaccgaagatctgtaacgaaaaaaagcggcagcacaggtcagaccgcaaagcgaggcgaccggggcgtcggccgacgactgacctggaggacatcgaggatcgagagatcgacaaacttgccgacgctcgagtcgtacacctgagtgcccttgatgacgacggcatgagcaggtaggttgacaccccaggcaagggtcgacgtgcagcagaggacctggcgcaagcagggcaagcattagcgtcggctcgactcccagcgtcctctccgaggttgaccttcagacagttggactcgaacgcgcgctccatgaggttgcgatcgctccggagcatgccggcgtgatgaatgccgatgccgtacatgaagagttccttcatttccttgttcttgcttgtgccaatatcgcggtggaagcgctcccattgcgggttcgctgtacagtcgtagtcgtcggccgtaccttccttctgcatctggtcgtggagcgtcatgcccgacttgaccgtctccttgcgggcgtggacaaagaccatgacctggtggccctcgcggacgttgtcggtgacctgctcggacaagagtatcggcgtcagcgaaggccaagcctcgagcgtctcggagcgacgcaagcgcaccttctcaaaaacaacctcgtccatgttcttcttctgtgccgggctattggtcttgcccttgatgccaagaaagtgctgctcgagcgggaccggccggaaggacgagtcaaagtagaagaggccgtggtagcgcgagacgctgcgacggaaaagcgcgacgtcaggccggcaacccagagacgccaggcagatgcaggcctcaccggagaaagtcgccgacgtccatatagtttggtagcgtcgcactgaggccgacgatccgaatgagcgactggctgctttcgacctgacggagggtccgggcgacgatcgtctcgatgacggcgccgcgctcttcattcagcaggtggacctcgtcgatgatgagcagcttgaccttctgcgacggtgcaaccaatacgcgaaggacagcgggtcagctggcggcctcgatgagcttcgcctcgcgggggaacgcaccgacgcgagctcgccctctccggtcggtttgcgcgtaacgacatcccacttttcgggcgtcgtgacaatgatctgcgtgtcattgatttcttgcttggtgagctgcatgtcacctgggggtcgtcgaacagagtgggtaggcgcttgtcagcgtcggcaaggagtgtggctcatctctcacgcgccgcgcacctgtcagttcgcggacctggatcccgatccaagcgagtcgcttgccgaacttgcggacgacctcggccgcaagtgccttcatcggcgcgacgtagatgatcttgaactcatcctttgctatcctcggaacgtcgggcgtccttgagccggccagcggagggaggaggtgctgcgagaggacgcggaggatcgagagcatcgcgacgtcggtcttgcccgctccggtcggcgcgcagacgagcatgttctcgtttgtcttgtaggccgtcggatagacgatcgactgaatgcggttgagcgtgacgtagccctgcagtcacgatgagagagcaggcgagtcagtgccgggaacgctccggacctggtgcagcctagagcgcaacgcacaggaaaggagccgcggcagagcggatcgagctcagcgcaaggaatctgacgctccgttgtcttgggcggcagtggccgggacggcgggacggtaactgtgggcgcgaggcagaatgacaaagcggtcagatcacgtcagatgcatagagaaggttcggaagcactacggaccctcctcgtgcgcctaatcagtccggaaacaacggaagcgcgggtcagctttgaagaagagtgtgtctctcgtacgaggccctcttgacgtacgggccactcctcgcgcgtcgtccccatcggcagcgccagccggccgccgtagctgagtcccttgaggccgcccatcttggtcgcctggtagacatgcgggtactcttcctctgcaacggcggcctccttcaggttggcgagggcggcgcccgacgtccgggcttgctgggcgcggaagaccgacaggaactgctcgtcctcctggaggtgcttcggcacgagcgcgactggctcgggcggcggcgttggcggtcgcggcggcgacgagggaggaaggagcgtcgagcgccaggtccaagagaagggcggcagaccgccacttggcggaaggggagggagcggtccggggaccgacgggctgaacggagagaaggcggtggcgacacgagcaggagatgtcgacaggagcaggagctcatcagctcgaggtgtctttggaaggaccaaacggccacgcacgcgatgcccgacgaggacgggctcgctcctgcgagcaggctttcgaggtgggccttgtatgaggccatcttgctgcgagattcagggtcgttgtcggagtcacggtcggtcggagggtcgggcgctctcctctcctcctcaaccacctcgccctcccgtccaaccctcttgcccactctctcccatcgcgagctcgacgagcttcggccggaccggacagtgctcccaactgaatgctcacaactgtctttgctcggacaacgacccgcctgctgccgctcctccttcgtccggtcccgacctccgtgttgacacgcgtcgacatcagcagcccgccgtcgcagcagcgtccctacgcgatgctacccgtctctacatcccctgagcctgggtcgccctcgctcgtgccgttgccgctacagtcgtcctcgccgcttcctccaccatcaccgacgccgccgctgacgttgcagaagcctgccacctcgtcactgagttcgacctcaacctggcctcaccggtacatcgccacgccctccgcgttggcgggcgtcctagaggccatccgagccctgcccgagcccagtcccgatgccgtcctcaagcggcggcacatcttctttgactcggagggctacgagctcgggacgaccgtcggcaagctcgcattgatccaactcggcctccctaacccggctgccgagcgcgccgtcgacgtcttcctgatcgatgtcctcgccctctcggcgccagacgtgtcgccggaggccctccgtggactctgggacgttcttgaggacaacaagcgggtcgtcaagatcgggtgggatctcaagcaggactgggccgagctcttccgtgcgtgcgggcggcctcccttcctcctgctgctgcgcgcagctgatcgaacgctcccctggggtaccgccttgtagactcgcacggcgttgatctcgccggcgtcctagatctccaggtcgccgagctgctcggccgcgtgcgctcgagcgatgcccttcgggtccagggcaagatgggcgcggagcaccggcccgggtgggtctggtcgctcggcggcatgaagcgggccgttgacgacttccaggggtttgcaaaggctgagcgggacgaagccgagaagcgtgcgtctgactggtcctccttctttgccgatagttactctggatgctaacgctccctcacgcattacagtctttcactctgttcgcgcgcgcttcgaagccggcggcagtgcggcctggctcgaccggccgctgaccaacgatctgctccagtacgccggcctagacatcttcaagattgccgcactctatcccctcttccatgccgcccggccgacaccggtgcagtcgtcggccggccggaaaccgccaccgccctccgacgatccgctcatcgatcactcgacgctcgccgagatccttgccgtctcgaatcgggcgctaggcgtccatcggccagagcgccggcggccagatgacgagcatcaccagcacgcctacctgccgtccgaagtgctccagcccggctcaggcgagctccgtgcggccccctgcccgggctgcaaccggacgctgtacgagagcagctggcagctgcctcagagcagggtctgcatggtctgctgggccgtcgagcgccggctcagcaagcggcggggcgtcgagcgaggcgtcttcagtgctggcccgggcgcgccgccggtgcggctcggctgattgtcgaccaccgtccttctctcgcatcgcacgtttctccctctatcatgccatccggaccttgtatctcgtcattccctgcatccggattcgaccttcctgtcttgctatagagtcatctctcaacggacgtcgacgctgctcgaggttgagcgccgcgcagcagtcaagcgactttcctctccctccgccgccaacacctctctctctccggccgacagcctgatattcggggtagggcaagaagatcgtagactagtctgaacgtcctgccaccgaccctggagcctgcttcttctggccggccaccgcaaacgggcccgcttcggctagctccggcgaccacatgcagcttcagcctcgagtcaggcctggcagagttccgctttaatacgggcgaacctcctcctcctcctccttctgtccatcatctcgctccttccaaccacagcatgctctccagatcactgcccatcctccctctcccggctccgcacgccaacctctgcctcgcgccctcgctcgcctccgacgcaatggaccaaacgcggctcctcaacgacattcggatcgcctcgtgcctccgtgggccgccgttccccttcccgcgcgagaacgccgagcagtgggtcgcaggcgaggccgagcgctgggtcgagggctcattttggaaggcgccgagcggttgtgtcctctagacatctcttcaaatcgaagtcgagcagcaaacgagctgacaaaccgcttccggcttcctccagtaatccgacgcgtggccgacctcgagcaagactcgccgccagccttcctcgggacgatctccctctcctcttcgcccttcgagcacatctccgaccctgccgagcgcgctaggcggtccgccgcgaacctcgctctgccggccgaagcgaagcgctggtcgctcggcttctacctcgacccggcgctcgcggggaggggcatcatgtcggctgcctgccggacccttgtcgactacgccatcggccagggcctgagcaggcagaacatcctcggctcggcgttctcgaacaacgcgccgtccatgtgcgtctacagcaggctgcgaccttaaccatcagatggaagactgactggcgcccgctgccgctgctgcgcccagtgccatccagcgccgcctcggcctcgagccgcgctacctcgcccgccaggccgtcaccctgccagcgtcgaaaggcggcggatcggtcgacgtcgtctgcctcttcccgccggacctcgagctcgacgaggaacgcgaggttggctgggcgctcgctgagcgcatcccagcggggtcagcgtaagaatgccttttctgtatacgacagaaagccacgcgagcgaacgcccgcttttgagttacgtcttcattcgattcctacggcagggtcaagctttggagctgccggcattggctgtccatttgtagtcccagccctccctcccaggcgtctcggtcgggacgcgcatctcgatcgggaacatgccctcgacgcggccctgaccgctgcctgcaaccggccggaggacattgctgaggccctcttttgactcgccaggccctccgttcgacgcgagcgcgtaccagcctgggtacgtgcagcggagctcctccgaggcggcaaacatggcgtcgtgctttgtcttgagtgacagtcggtgggcctcgttctcctgctggcgatagacgagcgaggcgtgggcgatcgtgctgtggatcgcagaggcctcgtccggcgggaggacggcggccagcgcctgagcggcgtcggcccggcggggctgccaaggagccgtgtcggtgtaggacggccggtccgggtggtagagttcctggagaggggcggccacaggatagggcgtcagctacaggaactccttctatgacgaggcaaccgacgggcttcgtgcagcggtgtcggctcgtccagtcaatgaaggctgggctgcctccttcatcggaggccgacctcgacagaggcgcaggcccagcaccgatcggatctcctcgtgagacctcttgctccaccccctctcctacacgccatcagccgaccgcaaagctgaaagaaaggagacgcacccgcttgagcgtgtcggttgacgaatcgccatggtcgaccggcgggccgccggccttcttgggcgcaccagccgcgctcttgtcggcctttgaccggcggccgagagcgctaacgatcgtagggagccgggtgcgcgacgaagacgcgaacgaagggacaaggagcgacattgctgggttgaagtgctggtggtcgagcaggagggggaggagggagcgagttgaggtcgtcggcgcaggctgagtcgagaaaaccccaaacggcccataacatcccatctggcccaagttgtcccccgcaacagagcccggcaaccgcggcgaacgacgacgttcctcctcctcttccatcctgccttgcttgctcgcccgccctcctctaataccggcagtacagctcgtctctttccgctccacgatggcctcgcgctcggccctcctccggccggccgcctcgtgctcgaccgcctcggccggcgccgcctcccgctcttcttcctcctctgtccagctcgccgccgcctcgcgtcgctctttcgccctcacgtcaagccgccgagcagcagctagagccgacggcgaggacggcggtcgggaagaacgtgactctgcgtcgatcggactcggaccgcacttcaagacgtggctcaacatcaccaacctggcaccccgaaactggttcaagagcgacgagggcgagcgcttcaagtggccgaaggagggtgctcacaactggatcggcggcgacagggtgcgtccggcgaagagaggagccgctcggtcgacaagctgctgaaggactctgctgacggtcccgttactttgacctgacccttcgtcctctgcttgctcgactcgctccctgctgctcgtcctgctcgcgcgcgccggtagccatacaccgcgaacccctacttcaacccgaccccgccgctctcggcagacctccaggacgagatgtacgccgtctacacgtcgttcccggccgctgttggcgcgctcgagcgcgtcaatctcatctctgagcgctacaatatcagcaaggaccgggtaacggccgccatcaagacgggccaggtcgccgagacgtggaaggaggcggtcagtccgagcagtctccaaaaggattcactcttctcgtgctgaaagccacctgcctttccctgtccaacagggcctcgcgccgcagaacgctttcgtccgggggatggagtcgttcctcgtcgtcccgcggcacaagccgggcaactctgacgcccttgcggcctttccgacctacctcggctcgcggatcgacctcgaacgcgacctcgagacggccaaactcgcgcggggcgaggtggttgtccgggctgaggacaacggcttcacgggcgacatgcgctcgcatcggctgccgaggatgagctgggagctcgcgcctgagggcgaagtcgccctttcgaacaagatggagctcgagaagccgcttcagccgccgagggaactgccagagtttccttcgcgcgttgtccctgccggcgagcggagccaggccgtccttcatgtcgtcgacgtcggcgacaagttccgcgaaaagggctgggacggcaagatccggcgcgaatacgtcggcaaggcctcgggccagggctatccgggcaagcagaacgccattcggcgctttgtcccgctcctgacgcgccagatccaggagcagcacggcgtcgtcccgcattcaaagagcgaaaagtcgcgccgcagccgggaggcccgcgacgcgctcaacgcaaagggcgagctgacgccgacgcagcagacaaaggcgaaggcccacccgggcggcgtctacgacccgaccttcattcacaaggccgaccgcaacaaccaggtcttcgaggcccggatcgccgcccgcgaggcaaaggtcctcaagcgccgggcgacgtacgcgagcgacctcgtcaacgcaaaggccgagttccagcagatgatccgcgaccgaatcgacggcaagatctaagcggcgcctggagtggagggagcttccggaggacagaccaaaaagccggatgccatgacgctccgtattctggcgacggtgcggcgaaggagatggcagggcggtatgactcgtgggctgacgaaagtgggctgactgatcaagcgacgacggcctcctgacgacctcctgatgaagggggacgggcaggcaacctgcggcggagctgctgcgcgccgccgccgctgccggctctcctctgtcggccttcgcccactcacgtccctccaaccaccactttttcgaccaagtagctctcactagccagtcagttgtcttccagccatgccggatgcgagccctcgcactgacgtcccatccgcctcgcagtggccactacgctcaacctgaagaacaccgccccctcggcagacgagctcgtccgtcccttccatacgagccgccggcccccctcctcagctcgtttctacatcttcacaagccacagccgctgactcgcgctcgcatctcgcttaatgcagaccatctcgacgccggtcgcctaccggtacgccgtcgctcacttttggtacgccggcaccgtcaaggccggtggccaggttgtctcgctgaagggccgcgtccagcgcaacctcactgcccggcgcgagattgactcagccgaggccgaccggctgctcgcgctcgagaacaaggtgaggtcgaaactcaaggaggggatatcggcgctcggttcgtctgttttgctgacggctcccctttgatgccttgctcgcgcagcggtgacgccactatgatagcgtcgacggcaccagcttcgagaaggccagctgggccaactcataccacgacggccagccggacgacggcatacttacgttcagcgcgcaccgcgctcaggtcaaggccggcgtttgagtcgcgagtctagcccagcggcgctgcacaatcgcccgtcactcgcgccccgatctcaccatgtgcccttcgttgagaggctcggtcgcaagcagacatgttgattgggcgagctcaggacgtctgccgcgctgacgtctttggcttgatctgaccgtcgcggccctcgacccagcggatctcggcgagcgcgcgcgacgtcttgcgcttgtgcgtaggtgtcggaggccgctgaccgccgacgggcgaggccggctggagcggccggcgcggggcgaggacgtgctttggcggcatcggcgggaggggcggcgctggcggagcgcgcgtgtcagagcggacggtcgtcgacgactctgacgcggcccggcggagggtcgacttgggtcggccgtctggcttgtcgccagcggaaatcggcctgggcgatcgggcaggacgagagtatcagctcgacgctttaacgaggacggtaaacgtgcaatcacatcttgagctctctggccagctccttcgcgagctcacggacgaggacggcgtcgtcctgctgcgcgagacggtcgacaacctccgagccgccgcagcggcggagcaggccggccttgtctggctggctctcgacgacgacgcgcgcgagcttaagaaggttgagcctgactacgggccgagtcgtccggctgagtcgatcgacgagccgccggaagaaggcgggcgtcgccactttgctagcgacggcgggcgagaggcggaacaggcggaggtagcgctcgagtaaggtgtcgaacgagactgtcttggcctcgacaaagcacgacgcaagtcgctcggtcgcccagttctcgatcaacacgtcttcgactcgagccgtctcctcctgcagcctgcagagtgcgtcgacagcgctcaatcagtgggctgcagccgacgccttgagcgagaggacgcaccagacgagggctgaatctaaggccgagccttgccagtacgggtcgctcgtcaggtcgaggtaaactgatagagaatagcattgtcaagtcagccgatgggcgctgatcgagttcagatgaaaagaacgcgcgtctcagaccgtcggtcttccaaaggatcgttcgagagcccttgctcgcgctggcaaaatcaaagaggatcctacgcagtaacgctcgtcagtctcggatctcagaacgaggtaggatttgccggtacttacggcagggcaaactgccgcaagggcgaccgcgaggttacgagctctcgtaagtgcggaatgatgccgctctgcgccgtctcttcctgccggcccttgttcaagcggcataggttgaagagtgtttggaggacctgtagacggacccgcagcgcaggagcttaagtaggtctcgacggacgcgcgatgtactatgtcgactcacatggttgcagacctcggtgccgtgagtgccggtccggtatgtgccgagaaggtcagcgagaacctcgatcgcgttgacgttctgcagaacgttaaggttaacgggactcgtcgagaggtgcttgatggagcgcaacaggacgatgaggtgagtcgggtgcaaaccgtcgcatgccgacacgaggcctgtcaagtgacaaagcggtcagcggcaacgttccggcactgcgaacgcaaagcagactgacgcttcataattcgcctcttaccgagcgcagtctggatgcgctgatccgactgcgacacttggcagaagaggagaaggacggccaggacctgcgtcttggcctcctctgcgccctggtctcggtcgcgcgtgacattgagaacggcagccgacagcgggtcctcaaggccctcgcggatcaggacccgacaaaagtctgcgcgcggcgtcgcgctctgaagctgcaggacgctgccgatgccaccgagcgcggaaatgacgagttccttgtcacaattatctgtcagtggcggcacagtggtcagcacagctcgcagaaaaaacggctgcgcgacgcacagtcttcgtcgaggagctcgaccaggacacgcaggccgcggcagctgatgaacatctgaagcgtctgggccgatgcgttgcagagggccgagatgaagatggcagcctcgagccggcattcgggcgaatactgcttgagagtgctgattgcaggacgttgatgtcagcgagcgctgcaagtgaacccggtcaagcctggctcacaaggcgatgacgatcgggatgccgccgacgaggcaaaaggattcgagaaggtcgagattcgagatgacgatctgcgatgagccaggagggtcagccgactggcgacactggtcgacgtcgttgcagggccgaacgaactaagttgacaacgcgcagaagacgcaagatgacctctcgcgacggcttccactcgaggacctcaaggatcgcaagcatgccgtgccgggaaatgaagagctcccccatctcaggcacgtccgagatgatgttcagctaaaggcgccgaagaagtaagtcagcgctagcaaacggaagcgtgcggcgccctagcaagagacgcaccagctggtcgccgacgtcacggagcacagagttagaagcgctcggttgcagctcgtcgaccagctcgctcaggatggctgccagtcgggcgttcttgtcacggtcgagcgcaacgtccgagtcgacctcgtcgcggccgaacgactcgtcgattgcggcaaaagggtcctcctcatcaagatcctcgtccccgagccaagacttttccgacaggcgcgtctcgagcttgaggctgctgattctgccgacgtcgaccgagggcttgtcgtcgaagatgtcgtcgtagtcctcggcaccttcagcgtactgccgaaggtcccgcgcgtagaccgcctctgcgcgcggcaggcgctcactcgctcgtcgtatgccgccgtttggcggcctcaggttgtcgaggatacttggcgacgagccagaggtgacgcgcagagaggcaaagcgaggcgtagagggaggtggtgaggggagcggggcgatggcgttgatgggcgacgactgcagctttgccgctgcgctcgaatggccgtttgccggaggagacaacgcagacgcaaatgggaagccgtgatcgcggatggcgtcctggtcgtaggtgatgtctggcgtctgacaggaggagtggtaggcagtagagatcagcgaagcgctgtattaacaatctttccacgaggccttacttgggcgacatgcgcagccgtggatcccgctagcttgcctcctctgttccagaaggtcgaaggcagggattccactggagaagctgaggatcggccgggcataatcgtcctgatgttccagtcgtgcgaccgcggctcgacgtcgttgctggcaggcagcgcaagtggagctgctgggcctttggctatggccaggatgttagctttagcagcaaacctcgattcaacggcagacaactacgcacgtttcagcttcgacagggagacgccctcctcaaaatcgctgtcccagttgtcgctctcgtcgtcagtgtcttggcgtgcaagctgcggcaatgacgcgggcaacggcttggccggtgaaaataccggctgcgctcgactgccagactggcgtcgatcgtgcagcaaggtcgaggtacccgtcaaggctgcgggagaaggaccggctgggtgaagagcagggaaagtcgagcctgacgcctggggcgcactcgtccgcgagcgaggcgaggccttgccgtgcgacagttgcgatggagggacatctgacggacgcacacagtcagcggcgacttggacgtagagatcgagacgagcacgcacacgccgtcttctgaagctgctcgttgaatttctggacccgttcgacgccctcctcgtagtcgagctggcggctgtcgagctgcttgcgcgcggcgagcatccaggggtgcttcatcagccggtgagcgccgactcgcagggccgggtccttctggaaggtggcaaggagaaagtcctggacggtctgcaaggtcgaaggcgagtgatccgtcagttcgggagaggactgcacgttgacaaaaagaaggcgcacctccgacagaccgggcgggatcggaggcgtgtcgtcctgcacaattcggaagagcgcttgcatcggctcgagcgcatagtaaggcggcttgcccgagacgagctcgatgacgacgcagccgacgctcctgccgccgtgtaagtgaagttgatcagaaggcgggtgacgactggcggctgcaagccaagggacgcaccaaatatcagacgccgtggatgcgcctgcctgctcgatgatctctggcgccactgaaaggaggagaagggcctaatcagggaagtccttagccgcttgacgaaatcaagactcactccagtacgggctgccgacgacgctcaggtcgcggccttcgccctcgctgcccgtcaggttgacgctgatcgtcgcgacgccaaagtcagcgagcttgacgcggccgtccttgatggtgagaatgttggcgcccttgatgtcgcggtggatgacgccttgctcgtggaggtagttcaggccctggagggtctgtgggtgcaggcgcccaaggaaggagcggtcagcgcacgagcagaagatgcgaagaagactaaagtctgacctggtagatgaactggccaacgaggtgctcagggaacttgccgaagcgcttgcagattgagtggagcgagccgttctcgcagtatctgcagaggcggtcgagggaagggaagggtcgagcgcgtcagtcggtcggcgcgcagcagctggtgcagaagagacgggcgacgcactcgagcacgatgtgcaagaaatccttagacttgacgtagcctttgtacttgacgatatttggatgctgaatgaaacagccaggtagatcgaagggtcagctcgcactagagagcgccggtcgaacaggaaccggcccgccaggcgcaacaggggagctcgcatgctcgtgacgggcaacgcacgttgaggttcttgagcaggttgatctcagactgaacgaggagggagcaaggtagagaggatcagaacgagtctttgctagagcgtacgaggcgggcagacggaccatgatctcgccgagctcggctttcgggatgttggcgagctggatctgcttgatcgcgaccgtctcgccggtcgtgaagttcagggcgcctggcagacggaggcgggccgttagtggggtgcaggacgcagcagtgaggaagaggtcttacggtagacggcacccgaggctcccttgccgaggaggtcgccgagttgctgcaagaggtcgagccgcaacaggtgcgtcggtggccggtcagcttcgaggatggagcgagagaggcgagcgaaggaggatccaggtcgacgcacgtagtcctgaagagctcgtgtcacatcctctttcggtgctgagcgctcgtccttgctctgtgcacgagagggtggccggtactgcgaggctgagctggagggccgagctccgggcgttgatggcgaggcggcgggcatgatgggcggcgtcccggtagattcggacgtctttcgacagcgggggcgacgaggggaagctggagctgctatctacgaactctctggacgtcgggaacttgagggaagactgggtgggcgttggaagagccgagcgaaggcttcggtgtcgaaaaggggctcaagcttcggcggcgctgggcggcgagcttgcagcaggaggacaagccgtttgctcgcgtccctccgacgagctccctcgtcctcctcgctcagaccgacgcctcaaatggacgctgtcgaacccgccgtgccgcagacggctgcggtcgcggtcgctagccagagcaacccgctgctgtcgctcctcgcggccatcgtccgggccgccttttacctcctcaacaagtgtcggcagctcgtcgctttctgcacgctcaccctcccgctcgtctttgtcaacgtgctcagctggagctggaccttccaggtgcgtgtccctgcttatcaattgcccgtcactcgtcgtccaacggccggtcgggtggaagagcgactgcagaccaacccgctgacatgcgcgcgtcgtcccggccgccccgccgcagctcaatttccccgtcgtcttcttcctgctctgcctcgtcccgctcggcatcttcctcctcgtccgctacaagtacctcaacaagtatgaagagctcaaggagaccccgtgcgtgccgccgcgtcctgactctgcttgcgagccggcagcctgagctgacgcgcgtgctacccgccctctgcccgcaggctcaaggagcccgataccaagccgctgcatcccgatgtgctctcatcgacctactcgcaggagaagggtccgatgcacaactatctcgacgagtttctctcggctatccgggtctttggctttctcgagaagccggtgtgagtcttgtgttcccgccgccgccgctggctggcaggccagctccgcccgcgtcatcgccgggccggctgcgagccgtctgtcgtcccgtttgctttgactgacccagcctggacccaacttcagcttccacgagcttagccgacacctccagacgcggcggcttgtcgccggtgactcgctcagcctcgacccggaggacaagtcgttctactgcgtcgtcgacgggtgcgtctcgccgcggcactcgagctgatcttgagttgacacctgtctgaccccctcgcggaccgcccatgcagccacgtccaggtctttgcgccgtcaccgccagggctccatgcaccgcacgctcacgcgcccaagctccggacgccgcgcccgctcggtgcgccgccgccagacgacagcgattcggatgacgatgacgaggcgccgctcaacggctttgacctcctgaacgaggtctcgtccggtggaacactgtcgtcgctcttcacaatcctcagcctcttcaccgaggacgtccgccttgagtgggatccgccggcggaggagacggaggctgaggcctaccgcgcgggcgttgagcgggaggaggaggcagatgaggagcgagacggtctccaatcgttccgcgaagccatcaactcccctacacacccgtcaggtctccctccggcgtctgacaatgggctaccgacgcctgtgcttggcagcggctcgcattatccggcaggcaatggcgaccgcatgtcgtctgctcgctcgtccgcctctcggccgagcagctcggcccgaacgccgctcgagtcgccccacatgggcagccggccggcttcagctcgtcattcgacgcgaggcggcacgccgctcggcgacgctcgcggtgtcggccagggcggccgcttttctggcggcgagggacacaacgccgagcggggcactgtcgcccgcgcgaccgttgactcgacgcttgcggttattcctgccgacgccttccgccggctgacgaagaagtttccgaaggcgtcggcgcacatcgtccagggtgcgtcaacgtcaatgagcctcgtcttgtcacgcagctcatcccgctgacagcgattctttctcacagtcatcctcacccgcttctcgcgcgtaacctttgcgacggcgcacacctacctcggcctgacctctgagggtgcgttcgcttgccttgaggtgccgacccgacgcattctgacccgcttctcatcgcagtgctccgcgccgagtcgagcctcaactcgctcgtctcgcacccgctgccggctcaattctacgacggcggcggcatgcaggcgcttcgcgacaagttccgccaggagaaaaagtcgtcacggggcggcgacctcgatggcgaggttgccgaggagatcccggacgagagcaaaggccgggcgagctactttacgagcatccccggtgcgcgcgaccggcgcagcagcggctcgttcggtcaggcaacgtcgtcgggcaacatcaatagcctcaacctcgccgtcgactcgatcaacacgagcccggtcttcaacacggcgccgctcccgacgccgtcgtcgcacccgccgacgccagcggttgtgcctacgccatcacggccgcttcgaccgctggtgccgccctcgccccagaacttccggcggacgccgacggcgatggcgcccggtttccgtcggggcaatacgcgcaagcacgtccaggccggcgacttgcttagcatgaccgacagtggcgaggccgcctataggccgcagtcttttgcggccgtcaccccgcgaccgctcgcttgggaccaaccccgtcggagcaacccgactgcccagcagccgctggcaacctcgatggagaacgcgctgcccgacttcaacctccgagacgctgtgatggagagcctcgccaaaagcatcggcctaatccagccgccaccgttcctgcccgactcggcctcggcttcgacgtatgcgcactcggtcaacggctcgtcggtgctccactcgccatcgtcctacacgcccttctcgcagtcagcgtcaacctacgcgagcttcggcgccggcctgagcatgctcgagcgcctcggcgacgagagcagcacggcgggcgggagtggcagcggctgggccgccggcagcggcacgggcgaggcgatggaggagctcgaaaacgaagtcgaaatcctcttcttcccaaagggcggccagctcgtcaaagagggcgagaagaacgctggtcagtttgccggtccatcatgccagttcggttgcagatgctgacatctcctgattcgcctcaggtctcttctttgtcatcgacggagcgctcgaggtctcgctcccgccgccgaaggaagcgctcgaggctgccgccaagaagcgcaaggcggcctcgacgccagctgcgcgcaaggcggcaccgccggtggcacgtaatggccttccaaccccgcttcggacgccaatgtcgcgcgacggccacccgccgtcggcggcgcccattgccgagcctcggtcgacgcacctctacacggttaaacccggaggcgtcgccggctacctctctgcgctcagcaacgcaccttcttacgtcgacctcaaggctaagactgacgtttacgttggcttccttccggctgaggcgcttgagcggctgctcgaaaagcggccgatcgtcctcctgacgctcgccaagcggcttatctcgctgctctctcctctcagtacgtgcggcggcgctggctccagtccattcctgaaactgtcggctgatgactaaagtctgcctggcttcttccagtcctgcacattgacgcgtcacttgagtggatgcagcttgatgccggccaagtgctctaccgccaggtgcgttcgtccttctgcgccaaacccgtgcaacgtagctgacacctggccgctatcaacagggcgacgtctcggactcgatctacatcgtcgtcaacggccgcctccgcgcgctccaagatgccgaaggtgactcgcaagtcgagactgttgcagaacacggacaaggcgagagcgttgggtacgtgctggcgccagctcagcacgccaaacccttttttttggtgctgaccatcagcctctgatctgcccacagcgagctcgatgcgatcacgaagcggacccggagcagcaccgtgcacgccgttcgtgatactgaactcgcgcgcatgccgctcacgctcttcaatgctatatcggtccggtgcgtgcgctcgagcttcctctctgcgacctccgtcgactgacgcgccccatccgcctggtcagacatccggcgacgacaatcaagctattgcagctcatcgcctcgcgcgtcaccaaagaagtcggcgtcagcagccatcggccacccaccacgacgccaggcgcgctcgagcttgtgccttcaaacctcaacctcaaaacggtcgccatcctgccgagcagccgcaacgtgcccgttgctgccttcgccaagcgcctgcgtctcgctcttgaggacattggggcctcgacggcctacctcgaccaggcgaccgtcacccggcaccttggccgccacaccttctcgacgatgggcaagctcaaggttgccggctgggtgcgtcttctgacgtttgtcgagcttccgcttctcgactgatctctctgcaatcctctgatcagctggccgagctcgagcagcgctacaagattgtcctttacgtcgcggacgccgccgtcacgagccagtggacgctcacctgccttcgccaggcggatcacatcatggtgctcggcatgggagatgacccgagcatcggcgagtacgagaaggtcctactcgcgaagcacgacctgacggcccggaaggatcttgtccttctgcacccggaccggtcggtcgcctcaggctcgacgcgaccctggctcaaggagcggccctggatctcgcagcaccatcacgtcgagctccctggtctcgtcctctcgaccaagaccgcccctctgccgagtgatccgaaggccgtcgcggccgtcaagcggatccgcgaccaggtccagtcgcagatcaagcgcctgcgacggcaccggccgatcggccgcgttcgaacgtcgcctcacatgaacgactttgcccggctcgctcgccgactctgcggcgcgagcatcggcgtcgttctcggcggcggcggtggccgaggtatcgcccacctcggcttcctcgaggcgctcgaggacgagggcgtgccggtcgacatgattggaggcaccagcatcggcagctttgtcgtacgtgggctcttccttcccggctgcggcgctttctaactgacccttcccgctctcccgattggcagggcggcatctacgccaaggactcgaacctgctcgccgcccacggcctgacgaagcagtttgccggccggatgggcagcatgtggcgcatcctgagcgacgtcacgttcccgacgatcgcctatacgaccggccacgagttcaaccgcggcatctttaaggcgtttcaggacgtccacctcgaggacctctggatccccttcttctgcaactcgaccgacctcaactactcgcgtatgcagatccacacgaccggctacgcctggcgggccgtccgcgcgagcatgacgctcgccggcctgcttccacccctctcggagaacggcagcagtgagtcgaattgcaagctgatatctggtgattcagcgtttgacctctttcctcgcgtatccctcccagtgctcgtcgacggaggctacagttcgttccctccttgtcacttggccgggtgccatcagctgactctgtcctctttcccttgccgttgcagtcgacaacctgcctgtcagtgcgattcggctcattgtgcgccacgcaacgctgatcttgcctttctctcaggtctcgacgatgacgcagcgcggcgcgagccgcatctttgcgatcgatgtcggcggcctcgacgaccagtcgccccgcaactatggcgacaccgtcagcggcttctacgtcctcatcaatcgctacaacccctggtcgtcggcccgccacatcccgaccctgaccgaggtcactggccgcctcacctagtcagtcgcaccgactgagccgcgcccgtctctggagcgcgaggctgaccccccccctcttccattgcagcgtctcgagcgtcaagtcgctggccgaggccaaggcgacgccaggcgtcctctaccaggaaatgccggtccaacactttgacacgctcggaggcttttcacgtttcgacgaggtgctggccgtcggccgggcagcggccaagcagcagctcgcagagtggcgggccgagggccggcttccgacgggcctgctcgaccaggcctcgagcaagggtggccggcccaaggacagcgtccgcatccggcgcaacagcatctagcttgcgcgcggggttgcagtggactcttcttgattgtcatgaccatgctgcgactgataaaggggtgctgaggggggagttgaggggcgcgtcgacgtccttcttgtcgtcgtagtggtagccgtagtcgccgaccttcttgacgtcgatgacggtcttgacgagctcaaactccttgatgacgaaggtgaagctgccggcggcccgggcgggtaggaggcggtcagcgcgaggcgggccggcagggagagaggggagggagaggacgcacagctcaatgtccttcttgtcgtcgtgcctgcaagggaagaggtagaaacggtcagcgataagggcagacagtgcagagagggagagagaggccgcacttcttgacctcttcattgcgcgcgacgggcgaggcgaacgccatcgggagcgagagggcgagcagggcgagcggggcagagaacttcatggcgggcgagtggtggttgagcgggtagggttggagggtgagagaggaagaggaagagaaaagagggatggtgagagagaaggaggaggagaggtcaagagagggtcgcctcttgtactccccagcagcaggcgagggccggcgggcagggcgctcatttccgcatcggccgggagaaggggcgagcgacgtcagtaggcgccaagacggtcgtgccagcgtcgcttcacgccctatgcgtcgggtaacaacctcttctggtccatcccgtgtcgtccggccgtcgtcgctggccgcctcccctgcgccgggcggaactcaggcaggcatgcgcaaggatgacgacgccgtgcccttcatgcacccagacgagagggtcatgggaccgctagagggcgccgccgatgccgagactgctgggcgagacgggtgcgagcaagcgcagagtgtacgagacggcggccgaggacgctgcgcagggacaggcaggcgggcaggcagaagctggcgtgacagctgaacgaccaacgtcaaagtcgaatgatgtcagagccgtcagtagcgagggtaggaccgccgagcgtctggagcagcgacgaagacggcgacgacgaggtcggattgggtcgaagaaggacccgggtgcgccgcagaatcagagacgagatgggcaagcaggccgcccgagccagcccctttcaggcaaccaccatgagaaggctggtcagactgcgcacgagcccatctgcatgccgcctcgccctgctgcgaggccgtgtaggacggagatgagagcggggtcagccgtgccatggacgagatgtccgtcagctgcagaggaaggctcgaccggccgcttcgcctcttgtctttgtcgaccgacgaccaccagctcgcctcgcctgccgccctttaaacttcccgagctactacgagctcacctggcagctcacctggtcgacttgcctgacggctcatctgaacgaccggctacttgtccggcagggtgtgagtcagcatcggccctgccaaacggctcgccttgcttgactcaatctggtggccctgctcgggccggtcggccgcttccctatcgacgacgactctcccagcatgtcttcctactcttcagccttcacggctgcctttccgctcgtcgccgaccacatccaggcccgagcgagcgcgctggccgagctgccgacgctccctgcggcgggggaggtcgaccgggcgtttgctgcgctcgcagccgagctgcccgacgagggctgggggaccgagcggacgacccgccatctgctcgacgaagtcgttggcgggctagcgattggccaggctgggccgcatgtgcgtctatctctcgtccgcccgagggcactcattgtcgaaacgaccggcgctgaccctcgcatcctcgtctcacgccgaccggccttgtccgaccggctgccatctcgcttgccctccgctcctcctggcggctgcagtactacggctttgtgactggcggtgtgacggaagctgccctcctagccgacctgctcgtcacgtcctacgacgccaacgtccaggtccacctgccggcccagacgctcgcaacgtcgctcgaggcccgcgcgctcgacctcacgctcgagctcctcaacctcccaaaagacgtctttcgtgggaggacgctgacgaccggcgcgacggccgcgaacatctgtggcctggcgtgcgcgagggacgcgctgtttctgagggggacgaggacggtgcctgagggatgggtaattgctgaggacggcttcccgccgggcggcgcgcaggtcgatatcctcggtgcgcgcgtgcacgcgtcggttcgtcgtcgccttcccagcagagagtgcctcgatacgtcgccgtacgcacactgaacggtatccctgccctgcggcgcttgcagctcgtcaaggcggcggccatcaccggcatcggtcggcgcaacgtcgtcgatctcggctcgggcgacctctcatttgacctcggccggctcgaggaccgtcttcgggcgaaccgcgagcaaggcaaggcgagtatcgtcgccgtcggctttggcgagatcaatacgtgcggcactggtcgttgtctgctgggccgagcgcggtcatccgacgctgactcgcaacatttctcgcccttgcctcacagcggcggcttcacgccggacgtgccgcgtctcagagagctctgcgacgagtacggagcgtggatgcacatcgtgcgtctgcctacttctgaggccctacgctgctctcatcgctgatatgcttgcttcgctgctgcaggacgccgcctttggcgcctttgccgctgcccttcccgagctagcgcactatgtcaaggatcttgcgctggcagactcgatcgtcgtgagtcaaagacatcctcgccatttgctcggcgagctaaccttcctctctgaccaacctccgcaggccgacggacacaagtggtgcgcctctcctcctgtccgcgctcgatgaccgcttcctgcgctgactcactccttactctaggctcaacgtgccctatgactgtggtctactcttcacccgctcggccgatgccctgccgcggtcgttcggtccgtcgcccgcttctgccccgcctccttacctgacgcccggcgcgagcgtgacggcccagccgccggtcccctcgcctctcaacgttggcatcgaaaactcacggcgcttccgcgcgctgccgctctacgcctcgctcgtctcgctcggccggaacggttaccgcgcgctcatcgagcggaacgttgcgctcgccgagcggatccgcgcgtggatggcctcgcccgagggaagccgcttctacgaggcgatcaacccgccaggcctctcgacgacagcctcgcttccgctcaacatcgtcctctttcgcggctcggccaaactcgcacagcgctgcgagtggcatccggcccaggaaggcgcaggccaggcgctgaccgaggcgatcaacaccggccggcggatctacgtctcgccgacggtcgcttgggacggcaagagcgcatgcaggatcgccgttagcaattgggcggcgggaggcggcggcgaggcggagtgggagcgcgtgcgcgaggcactcgtcgctgtgggtgagcagggtctttgtagaacgccggaggcttagcgtcgagctctgtgcgacgacgaagacccgaccaccggacgaatggaatgcgcgctcgaccctcagcggcctccctttgtcttgctgacgggcgctcccgctgatttggcgtgcgggagtcggcgagctggaagaggagcaggcactgcgacgacggctgatccactagtctgcaacacctcactactcttcgcaggaagctcagccttcaagaccatcgtcgactcctgcttgctcgtctgcagacggagactcttgcgtcggggccgagacgaggctggtcggtcggccgacgaaggcagacatccttgctcgtccaggtcgatctgggctctcgtccgatccaccgaagccggtcgctcagatctcatcatatctgaccgagagcctgtctctatcgcgctgctgcctgcatgggccgtctggctgcctgtgagatggcaggcagggccaactgcaaaaggggccgacggggcacagccggtcggtcggtcaaaagggcgccaggcactcctcattcttggatcagacactgctggtcggcgcccgactttccgttaaagcctgcaagaaggcccttttgcagccagatcgacgcaagatcgacgacactctgctcaagtgtctcgtccagccggtgtcgcagggcggccttttctatttctttctcacctccgtcgcgcgcgcgtcgaactccagcccagctgctaagagacaccgaccagcagacggccagccaggagccgccagaccttcgcgagctgacctgtctcgaaggccggatgctgagctctgcagacgaccggtcttcgggacgagacctcattggattcggtccatctcggctgctcgagccctgacccagaggctcggtcgaacaccgaccggctccgctccgactactgggaaggctcgacgagacgagatgctataaaggacagggcctggcagcccgtcttcccttccttttctccagctcactcacctcaccaagaaacacaaccgctcacaactcgactcggctcctccgacggcttccaggcctccaacgagttagcccacctcgacaaacgtacctggggctggttgtgagtcggcccgcggagcagcaagctttccctctccctgctctgacaccctcccgtgctcgctcaacgacagctgctggtacggctggtgcgacaacggctacacctcctcgggctcgaccggctcggcctcgattgccagcgtctcgtccgtctcggtcaagtcggccgccagcgccgcctcggccctctcggttgcctacgtcgcctcggccgcctcgcaggcctcggtcgcgtgagtccctgctgaattcaattccaacttctctcgagtcgctgacccttctcctctcgccctgatgcagctcggtctcggccgcctcggtcgccaaggctgcctcgctcgcggccgcgccggtcggcccctcggccagcgccgccgcccctgccgtcagctcggctgccccgctcgtcaccagcggctacaactaccagacctggacgggatcgcttggcagcggctgcgcctcggtctacacctaccagacgtacaagtacacgtgcaacggccagcagtttaccgacctctactcggccctcgcctactcgtgcaactcgcagcggaacctctgcaacgccgccgccacctggacctggtggaactggtggggcttcagctacgacgactgcacgcgccagtacaccaactgcatcgccaaggctagtggcaccggcacctcggcctcgggctccggctcggtcgcggccaactcggtctcggccatctcggtcgcctccatcgcgtccaaggcctctgccgcctcgattgcttccaaggcttccggcgcctcggtcgcctcggtcgcatccaaggcctcgctcgtcaatgtccagcctgccccctcggccgcgagcatcggcgccggctcggtcgcctcggtcgtcgctgccgcctcgaacgccgctgcggcctcggtcgctgctgccgccgccgcttccgcctcggccgccgccgttgcttccaacgctgccgctgcctccatcgctgctgctgcctccaaggccggtgccgcctctgtcgccggtgccgccgccgcttcggtcgctgccgccggtgccgctgctgcctccgcctctgctgcctcctccgccgccgctgctggtgccgctgcctccgccgctgccggtgctgcttctgcctcggccgctgctgcttccatcgtcgccgcctctgtcgccgccgctgccgccgccaaggcctctgcctcagctgccgccgccgtccccgccagcgtcattgtctccggctcgatcccctcgggctgggccctcgcctcgggcgccatcgtctcggacctccaccagtcgggcgcccgcgtcctcgtcggctcccagggggactctggctcgatgacgcctgcgttctgcatcagcgaatgtgctggacgcggcttcctccttgccggcctcgagaacggcggcgagtgtacgtcctcttcctctcacctctcgcctgcagcctcgctcgaacattgactgacaaccaactcgtcgctttgtcaggcttctgcggtaactcgctcgtcaacggcggctcggtcggcacgacgacggccaacgccgtcaagccctgcaacggcgacgcatccctcacctgcggaagcgcctccggcctccagctctaccgcaacacggccgccctcgacggctcactccagccgatcgctggttacacggctcctatcgcttcgggctcgtcgaccggctcgggttcccaggacccgactggcatcaacgtcggatccttcacgactgccaacggctacacgacgaatggtgactgcgtgcgtcttcttatgccccttttctggccttgcacatgtaccctcgctgacatgagggcggtcaaacaggttgccgagatcaacggccggctactcaagggtgcctctttccagagcaacgagatgacttacggactctgcacgaagtgtgagtctcggacgaccggcctccaggttgcgagccgctctgacgctctcctcaattcttcagactgcgccgacgctggctaccccgtcgctggtgttgagttcggtcgcggtgcgtgccctcccctcgctctgctgatcttccacgcctgtcaactgacctggcgctctttctccgacccacagagtgctactgcgacgacaagatctcggttacgatcccctccacgcagtgcacctctcgttcgtcccactctcctccttcgcctcgcccgcttcgcccagctgacactcccgcccctcccgctcgacagcctgcaccggcgacaactccaagatctgcggcggcggccaggcgatggttattttcaccgcctcagccgtcggcccgacgaccgccccgctcgccaacggctggaaggccgccaaggtctgcctggccgagaaggccgacgagcgcacgttcaacggcgcatcctacacggacaacgagggcatgacgcaggaggcctgcacgaacgtgagtccgacctgctctaatgggtgaaaggacgagtgccgccttctgacgcctgtcctcctccccaccctcgaaccagttctgccagaaggagggcttcacccaggccggcgtcgagtacggaactcgtgcgtcaccctctctctcactaccccactaaagaatccgggtgccgtccactgacccacttactccttcctgatcgcctcttgcagagtgcttctgcgactctggcgtggacctcgccgccgctgctaaatccacgcagtgcaacatgccttgctcgggcgcgcagactcagctctgcggcggcggcaacgccctctgggtcttcactcagtaaacgctccctcgaagccctccttccgttcttcttctctcgtcgtcgtcgtccgtctcctcgcacctccctctgcttgtcctgtcgctgtccctcgtcccttcttctgttgtcggtcctgtccgcctgccggtcagatcttaccccttttgtactccctcttggtctgtacgctccctcgcagaccagcccaaaactccctttggcgcgccctgctcgtcgtcacaacggggcccgacgtctccaacaggctgcggccctgatcgatgcttccttggtcgccattacttgtctgcggagggaagaccagtttgccacgctcaatttctccctgctcactctcgtcagttctcaaccgctcaagcatattggtcccaacagatggagaggtgagcagcagcatgcaggctcagccgggccgccatagcgagcgcgcccgggccgtcgggcgcccagacctttgacgctcggcgggtggccggtggctgaaggagagcctgccaagaagattagcagcggggcgcgccgagtggtcccttgctgctgccctacctccagacttgacctctcgctacatacgagagcaattgtctgcctacctgctggctacgcgcaggtcgaagacaccgaccgacggctgccgccccggatggaggagattgcggggggcggcagcgcttccttgctagctggcctgctgcggagagggtttctcgcgcgtcggctgccccgcctgcgctaccgcctcgcctcgcccgcaacgtctggccggcagcggctgcctccttccttcgttcgcaaagatcggagcagacggcagagaaggaggagggggcaagggaagagagaggacgaggagggcacctctctctgaccctcattctctatcctgctctcgcccagacgacgcagtgcgtttcatccgttcagccttcgaccgccgagcccctcgttcgctcgcgtgaccttcgctcctccgagctgacgcctcctccgccgttatcgccctgcggcttgcccagccgagccgagcgcgctactcgcctgccttcatctacttaaagctcaaccgagagagacatgttgctcgccgctcacccacaaccgactgagccgctgctgccgccatcgcgcgccggcaacttcccaccctacaccccgccatcaacgccagacgatcaagaggacgccgagatgctcctcgcgcgaaggaggtctgcggagcctacatcgcctccgccgccgcctgctctgacgatgacgacggcgcgagcgagggcgctcttccgctcgagcaagccctctgtcttgccgacgacaacgacgacgaccgcgattactggcagccggctcggcaggcggctctcgccttcgcctcgccgacgattctcgctcgatgaaacttcctcccactcgacctcgacctcgccgacgccgacggcggctcaggccctagcggactcgacgacgacggccctgaccgggcccggatccgtcactcgtctctcaccagcagagcgtagtcagctgctcccacacatgcgcagcgcgctcgacaagcttgacgcctcctgctcctcctcttgctcctcctcgccggcggcggcaggagcgagcaggaagacggccgtccacgtcgtcctcgctgagaagcgcgttttcgttaggccgccgaggtgcaagggcccgagctgggaggatgacgagtgggacgggcctccgccggcagacgagtcgagtgtgcgttctcttgccctctttcgcttcttgtcgctggcatcgggctgacatcctgcgcctttcggtcgatctcctgtagcccaccattgtccaaggcgtccttgcgatcctctcgtccgaccgcaagacagtcgacgatgtcaagctcgtgttgacggcccaccagacgctcgcgctcaagcggcctctcggcggcggccggtcagcggctgaggcgcggcttcagtgcccgccggaggagtttgacctcgctcgctgggaggcgtcgttcgtcgcttgctcgtccaaacccgaaggacaccacgccgagtcgtcgacgacgacgccggccgtggccgtcgtcgagctcgagcgggggctcaacctcttccgctttgagttctgcctcccgccgacctccagcccatccatcacgtcctcgtacggccggcttcgctacgtcctccgctcgaccgtcccgggcctcggctcgcggctctcggcccggcgcaaacggctcgcgacgcgcgacgaggtcgagctcgtcgctctcccgcggacgagggaggacgcaggcgagctccggctcgccgttaaacgctcggtcggcagtgggcgccaggcagcctgggcagggcgaaagggcggctcgatcgagatcgagtcaaaccacctgacgctcggcgcagacgttaacgtccggctctcgctcattgagccgccgccgacgacgacaatcctcggcctgagggcgttcgttgcacagacggtcttgcttcggaacgccaagggcgagcgcgagcgcgtggcgagccctcggaggatcgtcggcgtcgccgggcggagagcgggctggctcgtccaggacgtcagcagcgagcacccgccggtcgaagactggattgccggctcgggccggtcgaccggcgacgagcccgtcgtctttgacggaaacaccaccaccacccccactgccggcggcgagtggtcgttcagctttgccggccagatcccagccgacaacgtcgtccgaccgacgacgctccactggtcgccgacgaccgccggcctccgctttggctcggagctcgtcgtcgaggcgctcgtcgccggcgccacgggcccggccgaggtcgtcacgctctatcgcgcaaaggtcgagctggccgacgcaagctgcgagccggcggccctcatgcttcctccgtatgccgcttagcggctcctctgaatcccaactgtatcactccccgccccccctctctctctctctctctctctctctccttgttggacactcttttcctttccttacctctgtacacctctcatctgtccgcctgctcttcacgatccgcatgaccgcccttcgacgaccgagcaactctgcggccagcgccgcaaagcagacagcaaagtttcggcaccaagggggtatctttttagaccagcgcaaagccaccgttgcggcctgcaatgtcgcgccacatcgtcctttcgtcgccggcgttgcgcagtgcccagatctagtcgacgtcgggagcaaggcagaggggctgtcagcgatctgcctgcgcggccgagcaaaagggtaaaacgagacggccgcacctcgtcaaggagccgcgtcgcatggtcgagctcaaagagcgtgtaaatctggaaggacgagagggccgtgcggacccgaacgcggctagttgggtcgcgcagggtcgagccggcaatgacggtcggccaggcgagcctgtttgagccgagaacaagccgggtcagcgcgagcagaggactcggcgatgcgagcagcgccgctcagcagtgcgagaaacctcgccgccgctccaacgtacccgacctggacctgcttacgggcatgcgactcgatgacgaggtcgatgacccgcttggcaagcgcctgcagcgtgggcgatgccgggtcctcgccgaggacgtcggtccggagcatgagctgcgggtgacaggaggaggagtgctgttaacaacgcatcctgtcgccaaaggatctcgcagagatggacgtacctcgaatgtcatgcaccataacagatcgccgaaagtaagcctccgcgcccgccgctcgtcgacaaagctgccggcgccatcttgagggccgagcttgccaaacctgacgcgccggcggtactcttcgtcttcctcaaagacggtcggcgcgtggaagggcgggaagggtgaacgcgagagctcggggtacgaccgaaggatgtcggccttgcggacgccaatctcgacgagcgcacgcgaggcagcggccgtcgtctcctcgagatgtaaggcaggcgtcgtccgggccgccgagcagagcgcattgacgcgcgcaaaaagctccatgacggcacgcgaggtgccccaggaggtctcgacggtttcccagtcgatgccgctcatgtcgtgcgagccgctcggcggcgaaaagctgaagagccagtctgagagactctcctttggcaccgatccgtcgtcggcggtgacgacggcaggagcgatggcgatcagagatggtggggcggctgcgaaagccgtcggcgcggtgccggtcgtgagcgacgtcacgagatcccaagaggtgagcctaacaggaggggggcttctgcttcagcagcggcgcaagctcacgaaaggagagcgagacggggacaaactcttcgagaaccgaccggaggagccggagccggcgcctgcgagtcgctgcgagcggcgaggcttggctagtggccggcgtgatcgagacggccaaggtcgagagcatgcggcgagcgccgcccgagccggcaataacctccttggcgagcgcgagaccggcttcgtactcgtgcccgcccgagatgcagtcggtcaggacgttgaaagagcacgcgacgagtagtcgcgtcatgtcctcgatgtgggtgaccgcgtcctcgtcgctgcgctcttgaacgtcgccatcgacatcgaccccgctcggcaggctgagctgcgccagatcgagcgacgagcgagcgagtgagagcgaggccctagacatcgaccgcccaacggcgcgatagcgcttctcgctcgcggtcgagcgtgcagcggcggcttcatcgccggcgaccaaagcctgccgggcagaggtatggtgcaggtgcgagagatgacccgccgcgaccgacatgatcgccatcgagagggcatcgccggccgtgcttgcgccccgtgggagggcgagaaactggccgatgtcgaggtagggcatcatcgaccgcatgtcgagctgctcgttaccggcgatgacagccgacggcacagcgagcgtccctcgggccgattgaggacggccaatgaagacgactctgtgtcgggagcgcatcaggtggctgtgcggttgagatctgctgttacggcaatcttgcgaggagaaagacgtacgggatctgaaagaggaagtgctggatctgaaaggggtttcggctcgcggtcagagtcacgccgtcgacgatcagcgaggagagaacgcacgagcgaccgctcctctgggtttttaaacaggacctcgagcaacggtgtcggcgtcacgtagcgtggcagacccgctgcgcctcgccaatcgtcgtgccgctcgctcgaccgccgctggccgccagcgttgtgccagagcgcaagctgatcgtcatccgagggagcatcacgtgaaagtggctgcgacaagcccgagccagaagccgattgaaggagtggactgttgagcagcagcagcggcgagggtggcaggtcaaacagccaggccgagccgggcgacgccggcggcggcggctgggcgtggctgctgcgtgggatgctggctaacgtccccgagcccgagccgaaggcgaaagcgtcaaaggcagtcggcagaggaagttctcctagctctccgagatcccagacgcaggcctggtcgaagagatctggcgctggggcatgcgcttcggtgccggcgtgactgcggccgtcgtcggcgaaggcgtcggcgtgcgttgacggaccggccgtggcgtttaacgaccacaatgcagtcgagttagagtcgaaggccggatctggcaggaacgtcggcacagcggcagccatcgcagtggcgccatcgcgagaggaggtacctggcccgggggctgctgcggggcccgaagagaggaagggtgacggagctggttggccggcttgcagtaacccggacggctgtcgatcaggcccgccgatcatgacgtcgcctgtatccaatcctaccgaggcggccggccgctttgccctgcccggcgtcttcggtcggtacggtcgcggcgcgcgacccttcggcagctggtcggccgtcggccagacgcagtcaagcccggctgcccggcagcgctcgcacgtcggccgcgaggccggaccgagacgctcctcgccgcatttgtgcttgcctgggcagcgagcaagttagagatggcgtcagctgaaggcgagcgtgggaggcaggtctcacgcctcgaggtcgacggcggcgcagcgcgctcctgggcgaagccggtcgctgcgacgccctcggaccccagctctggacccgatgacctggcagagcagagaatgacgtacgccgacggcaggtgaggcatccggtccggcttctcgtcttggctggcctgctcggtccggcgaccggttgctgctcatcggcggcgagcgacgggaaggccgagagcggctgctgttgagaggaggcggcgtcggtcgagccgtccatcgtcggagatttcggggctgagcagcggtgtttgctgctggcgtgcagtgtcgagacggatggtccaggcttcccagggcagagagagggccagcagagagacgagatcgtggtcgacggggggcaagctgcgcctgcttccggccgcggcaacgggtgcgcggggcgtctctgagtttatgaacgaggtccacatcgcgagtcatcgattggataaaagtgcggcgtcatcaggagcacggatatcgctatatatgggcgcagttggttgggctttagaaaatgagaggctgcgatttcgtttcgtacagatataatcgagggggagatcgtcgaccggcaaagcgggaagggaaaggtcgtcacatgagagaagtgagagatgtcgcagagagagagagagagagagagagagagagagagagagagagagagagaggatggacaacagcgctgggagcgagagagacgaagctagatgaggacgagataggcaaggcggaggaggcgatggagaggaggcgatagagagaagaggagagggagggccaaaggccaggccgccgcccgccttaccggaagacgtagcgcatgcggccggggctgccgaggccaaagcccgggctcggctcgggttcgttgatccagccagtcggccggacgggcgtcgcaatcgtccgaccgccgccgccccagccggcatgtccgccggggctctcgaggatcttggaggccgaaccaatgtgccggagctcgtgctcgaccgcgctgctcgagtcgtacgggtcgccggacagagcatggaccgaagagcgccgaagaccgctgctgctgccgccgcccggggtcgacacgacgtcgtcgtctccgtacgtgagctcggcgccgagcatgccgagctcggcccgtcgttggaggagggccgcgccggcgggcgactgggtcgggtgcgaaacgggcgtccgagcgggcgtcaagccgtacggggccgaactgtacgagagcatcgagccgccctttggcgtcgccgaggcgtggagaatcatgccgcgccgcgacgacgaggccgtgagcggcatgccgccgaggtggtcaatcgagccgggcgaggctggtccgcccgggtaggcccagggccgcgggagcatctcgcgcggcgaggccgagatgggctgcatgccaggcgtcttgaaggtcgcgccggccgacggcggcgggtcgcgcatcgcgtgattgacgagctcgcccgtcgcgctcaggccccgggcgcggtcgccgccgccgccgccgccgttggtggccccgagcttgcggttgtggagcggcgagtggtgactgacgccggtggccgagaagttgtagtaggccggattgcccgtcggtgggcgccacgcgtgagccggggcggcgacgccgacgggcgcatggtcagccacctcgtcgtcgttggccgtcgcgcggagcgacgacatgggcgactggatgccgggcgcgaccgacgagtggaagcggctcgtcgtcggcgaggcaggcacgagcgaggcagacgacggcttggggctcgtcgacggctttgcgatctggaagcccggctggagcccggccgggacccctgctgccgacgagagtccgtcgtcgtacgcctgagcgtcctcgacgatcgacacgctctcggattggccgagcgaggatcgaagcagggcctggtgagcctggacggcttgcggccgaggtacgaacggctgagctgggctcgacgaggctgggctcgagaccgaaggcgtcaggtgcggcaggccgcggaggcacgatgctggcggcggcatctcgcgtgacgacgacgggaccgaggtcgggccggacggcggaggctcgcgcgaggttggccgctggggcgtcgcatagtcgtcagtgccgccaaggccaccttcgggcgcgtggagctcgtagctggcggccgagacgggtggccgggcgccgtggagcatcccgcgtggcatgggaagcgtcgggtaggacgagccgccgcgggggacaaaggccgcggcgagcgaggggagcgagtgcgagttgacctctggcgagtcgtaactctgagccgagccggccggcgagggcgcgccgtaatgagatagcggtgcgctcgtgttgatggcgacacggagcttcagacgcttcgccggatggagctctgacgggggcggcgactcggacgggcgctcgctctcagactcggtcagggcccctccgccggccttgcgcttcttcgaggtggcatccccggcgggcgtcgccgacttggatgatcggctggtggtggcggccttgcccttggcagcgggcgccgtcttgccgctgtgcagggaggcgcgttcgtcagtacgagagtagattgcgcgatcgagcgaacggggccgcgacgcacttcttgttgaagccaccgccctcaaactggtgctcgcagccggcttcgatcgcccagagcatgcccttgccgatgacgacggcctcgccgtcgcgcgtcttttcgcgctcgaccttgacaaagcacttgttgaggctgaggttgtgccggatcgagttcatccagccggcctcgccctttcggtagaacggataggcgcccgagatccaattgtagatttcggcgagcgagagccgctggcgcggatgggcaaagatggcctggccgatcatggccgcgtacgagaaggccggcttggccgccgagcgcgggccggttgggaggttaaccggcggcaagtcgcactcttggatgacgggcgacgtccgggacgctgaggcggaggttgacgggcaaggagtcagcgagcagtccaaggacggtcatcagctgagcgcggcacgaacccgtcccgccgagcgccttcttccttcggccgctacgtgacttgtcggcgccattggcgggcgaatcagccgacgccggtggaggcgcgacgatgacgctcggtaagccagacgacttgacaccgccggcgccggcaccatggccaaagacgtcagtctcgccgaaggcgatcggccggctgtggttctccttgtcggacgaggtcgaccggccatcctcggcctcgttcgcggccgcgctccgacgttcaacggtcgctgctgcgctgacgagccggccgagggaggacgccgagtccaacgaggacgacgtcggctccctcgggcgaccgacgaccgacgggagggcggtcggcgtcgccgagtaagggtggaaaaggagcggctcgatcggtaggggccgatgctgctgctggaggggcgggaaggtcgagccgccacctgccaagaggccagccggcgagcgcgccaagctggcgctgatgctcactagcgggatcgcccgatgcggcggcggtggcggcagctgcggaagcgagaccggcggcagagcgggcgggggcgaggcgggcaaggtgatggggtcggacgacgagcccgggccgaatgcccggcggacagcgtcgtcgatcgcatcctcatcctcgtccgacaggtcgtcctcgctggcgcttgcgtccgacggctcgcccgacgaaacctcgatatggccctcggccgacacctgggccgtcgagtgcgtcttgccgtcgtcttcttcggtagcagccgccgtcgagtcgcttggcgagctctgccagtagcactcggtctctgcccggctgggctcgcgccggtgaccgcgaccggctggccgctccctctcaccagcggcggccagcgctccgctctgcacgccacccgtgccggccgccgctgtcgtcgtcgagcgatatggcgtgaggatggcacctggcgagcggtgcgaaaggtcgagggcgggcggggcgtatgggtccgtgagcacggcaccggcgtggtggtacggccgaccgggcgtacggaccggcagggcgagaggggttgagagcgcggcgagctgggtcgggaacgactgcgagcggccgaggggcagaccggcaagcgacgtcgggggcgagcggccaaaggcaacttgctgctgctgatgctgctgattgagcacatggtcggcgccgccgctaccgccgccgccgctaccgccgccgccgctgctcccgccgcccgaccggcggatgagcgcccacttgcgccgctcctcgtcggcatgcgccgagcgcgacccgccaggtgcgcccaggacgctgtcaagaagcgatgacgacgacggtgtcctgagcggcgcgcccgagccggagcccgcagagctctcggcgagcggcccgtcggtcagcggcctgcgcggtgtgaaggcctcgttcgagtcggcgccgtcgtcgtccgaggacgagtcgaggtcggcgagcagcgccggaagcgaggtcgacgccctcagcggcgtctgctgctgaacctgagcttgcagaggcgctttcgtcggcgggccgccattgacggcgacgagtgccgcccgcgagatgtacggctcgagaatgtcgaattcggatgagccgtcgctcgagacgctcccctcgcgaatcttgatggccgcactcggcgcttcttcgcccgcggccgagcgcggggctgcggatgatgaccggtcgtgctgccgctgccgtggcgcggcttcgagcttgaccggttcagcggcggcggccgagagcgacgaatcatgcgctggcaggagaacggcttcgagcgaaggcttctgtctgagccgggcggtgccgccgccgacgggcgatggcggagggtgccgtctccgcttcgctggcgaaccgccgctgacagcgccgtcaaaggtcgagcccgacggctgcggcggcagcttctggccggcaggccggtcgtaggtcgatggtccggcgggcgagggaggtaacggtaggcgagcaggatcgaccaggccgagccggcgctttgtcggcgagaggagcgacggcggcgggggtggacctggtgagccttgcgagcgtcggttcgacctgctgctgccgacgacgggtgagaacgccgacgacgaagccgacgacgggagtgcaaaagggcgtggtggagggcgcaccgccgccgctggcgaggaccgcgcgccggcgagcggcggccgcgggctgaggaactggctgatggaagggagcgagaccgagggcgacatggcggccatccctggcggcagcggccggtcgtagacgcctggtgggatcggcgtccggccgtgcgggtggtgagtttgctgcgagcggtagggcgaggagccgtgcggccctgcggcggtcgagggcgagtattgggcaaagaaggagcggtcctgcggcggagggaacgaggctggcgagaaggcgtggccgctgccgctggaagggagcgggagtggagccgagcgtcctgcacctcctgctggcggcgagccgctcagaagcagggggccgcggtgctggcggtggttggccgagtgctcgtacgcggcgccagggcaatagctggagacgagtcggtcgcgggaggtgggagacgcgcatggggtcggacagagggagggcaggttgagtcgtcagccacggtttggcctcgcgttgctcgcctccctcctcccagcccgcccgactccaaagccctcctcgcccagcagcccgtccgcgagcgccgtcgtccgtcgccctgccagccgagctcatcgaaagcctgccttgttgacaagccgcgctgaggacgggacgggccgttgaggcggactcaaagaaggtttcctgggcgtcgaaggcccagagtgaggcgcggacgcgccagcctgcgcgccctgacccgagctggtgggacggcatccagcgctgcgacctctgcaagaagaaggaggcgggacgcacctgtctgggtgacggtcgtgcccggaagaggagttggcaccttgcctgctggccgaggtgaaggaggaggaggaggggccgcgcgtgtgggctgccatcgccggcggtcgacgcgcgtcaggcaatgacggcggtaggtgcggctgggagaaggcgagctgcatcagagggtcgccgcgggagaggggtggtcggccgttggaaaggcggcgagcgtctagcgagagacgacccgtttcctgtgctgctgaagccaagcgagtagggcgagcgaggttggcggggaggggagggggaggggcgttcggacggggcggcgcgcgcctctttgcgtccagggccgaaaaggcttcggtcggtggcttgcgaggagtggcccgactcggtcgtcgcgcctggagggctgttgaaggttgccggctggtgcaacggcagagggcagcagagaggatccagactgcagggtgagagagcagaggacgagagaaagggaggagggcacgaggatcgggaggcgacaggacaggttcgaggctgcctgcggcgttcgagtgttgtgcttgggtgccggcttgcttggctcgtttgattgcatgacgcgcccatgcagcagcagcagatccacgacggccagctggccgcccactgcgtcctgctccttctgccgtcctctgcatgcatgcccagagagacatctgcccagcttgcgcgcgcaatcctcgactcctctcgacgcaaggcctgcgtcggaccgtcgtgttcgctggcgagaagggcgacgcgcgcgagcaagcctcggtctcggcctccgttgggtgtcaagcccactgtctggccttttaaacccagactgggtgcagtcgagggtcgtttccctgccgcgccagatgcccgcccgacgcccgtctgctcggcgacggtcatcctctcgtcgtcgtcgtcgtccgcctcgtctcctcttcctcctcttccacggacagggcccctcagcgtctcctgccgaaccggcacccacgcacgctcgctcgtacatcgacaatgaacggcgaaccgcccggccagccgctggcgctgccgctgctgcctcagcaacagcagcatcagcaaccaccgcctctccagccgccgacgactttctaccagcacctttactcgcagcagcagcagcagcagctctatccacagcagcagcaacaacaacagcagtcgccttcgcagcaacgaccaccgccgccgccgccgcagcccctaccccttccgcccggttacccctccgccccgcgcctgccaaagaagcggacgcggaccggctgcctgacgtgccgcaagcgcaagcacaagtgcggcgaggagcgcccgcactgtgcgcgctgcctccgggccgggatggagtgtgtctggccggctgagggctcgggctcgtccgcttcggcggcggcggcgctcgcgggagggtcggcgacggccgctgctgctggtccgtcgttgtcgacggctgctgctgctggcagctcatcgacggccgccgagagcgcaaaggccaaagcgaggccttacccgccgcccaataagcgggcctcgtcctcgtcgtcctcgacccggacggccgccgctgcgggcgtcctctcccgagggaccagcggcgaccgctctggctcgttcggtcagagcggcgccgcggctggcggtccgacagcccagacgtcaaccgcgtcctcgacgacgtcgtcgcctcggccgctcggccacccgcacctcttccatccttcggcgccgccgccgcagcagcaacagcagcagccgtacggctcagccttcaacggcgccttctatggcgtcgacaacggccggtcgccgcatccgctctcgcaagacccggccggcatccatcaccatcacccccaccaccaccgcgccttctcgtcgccggccgcgaccggctctgtccagcttggcctagccgaccagcagcaacagcagcagcagcagcagcagcagcagcagctccagacggtcgtcctaaaccagccgacctacccgatcctctcgccctttgcgccgcccccgcaaggtcaccagcaccacagccatctcctccagcaccagaaccagcagctctcctcgccctcgtcgccgcacgtcaagaatctccagcacctcggccagcagcagcagcagcagcagcgcttcgatctcagcggccacggccagcagagcagcaatgccgaggccggcccttcgcggctcgcgccaagcacgtcgtcgatcaccggcggcggcagcggcggcagcggcggcggcagcggcggcacgctcggcctcgccgacttcgaagcatactttgcgggctacacggccgagcagtgggcggcgatgctcgacccggagattggcggccggtcgctcgccgacggagggagcctcctcttggctggctcgggcgggatcgacgggctcgcgaatggctttggcacaggctcctttgaccatccggcgcttgcggcgcatgagcaattgctgcctcagcacctgcctcagcaccagcagcaggctgcggccgaccagagcgtactcgacctgcacgctgcctggctcgcactcgacgcctcgtcctcggctgcgctcgcagccggcgcaggagggggcgagccgtcgccttcgctctggctgcacagctcgccgccggcgcttgacggcgctacgggaggaggaggagggggcatggtcgatgagcctgaccagctcgcgagcggtcgaccatccgatagctcgcctccgccgccttcgacgaggtccggcccgaatgacgcccctgcagcggcggcagcggcgctcaagtggatcaggacgccctcgccctccgccgccggcggctcgctctcggccgccaacagccggacgccctcgtccatctcgtcgcctgctgccgctgaccgcatgacgggcatcgagcccgcctcggcggccggctcagactcggccgggtcgacgcctagaggccggccgccgttccggtcgggcttcgcgcatgaccagcagcagcagcagcagcagttgcaatcgcagcagcaggctgtcgaggagccgccggtgaaggcgtggagtccctcgcagtggcagatggtggacgaggacgacgaggtcgacctccaactggagcagcagcagcaaaagcagcagcaaaagcagcagcagcagcagcttcagcaggagctccagcagcagcggcagcatcagcatcagctggcgccggccggccaggtcagcctgccgcgctacacgacgccaacgagctcgctcgtcctcctcttccccaatccggaggagcgccacctcgttcgtccttttctcgtcaagctcgtgtgtcgcaaccggagctgacactcatctcgactggcggtggcagatgcaacactttctctactcggtcccggccctgtttgtcggcatccaggcctcgagcccgctcgagatggcaaagtttgcgaccgaggagcacccaaacctgaactcgttcttccccttccgtgcgtcgcggcttctcatgtgctttgtgtgccccaacaggtgctgacgttgccgtcccgtccgcagtcgacatcccgcactttctctcgcttccgcgcggccagtcgtccgccgccgacgcgctcgccctctcgctcatgtcggtcggcgccggccggctctcgcacctctaccactcggaggcgggcgaggacccgtcggtcgagggcaactcgcggcgctactcgcagctctcggtctcgctcatgcaggcctcgcttggcctcggccagacgagcctcgcctttgctcgcttgaagggcaaaggggtcgggcctgctctgtcgatcgactcggcagccgatggtaacgccgtcgctggcgcccagcagcagcaagggatggacgacagcgagattacccagctcctcgccgcctgctcgtcgtgcatcctcgcccgctgcctcgccggcggccgcggcttcgaaggcgcgctcgacctcgcccggggcgtcgtcgagtttgctggcgggcccaaaaagatgctcgacgcgctctcaacctcgggctcgacctcgtcggcaaccgcggcggcctcggcaacctcgggctcggcgaccatcacgtcgctcgacccgccgtcgacgccttacaccacggcaggcggttcgcttggggccagctcgcttacgacgccgacgacgacgtcgaaagcgacgcggcgcaagcggctccgtatgctccgctccgtcctcgaagacctcgcctcgtgggacctctttgcctcgctctcgtccggcgcgaagccctcggccttctcatcgtcctcgccccactcgaccgggagcgggggcgggctcgcagagtggctttttgcctactcgccgccgagcggcacgcgcgagggcacgagcggcgaggaggactgggagacgctcgagagcacgctcggcttctcgcgcatcctgatggacctcttttcgcgggtgagtctgacggccgaccggtcgtcaccctgactcgtgctgaccgcgctctcgcccgtcaggtcaacgtcctgtacgcgacatcgcgctcgccgccggccggctcgtccgagccccagacggcgacgctcgcgatccagctcctgcatgagatccgcatccgcaaggccgacgtcctccgctcgtacccggagctcgctcagcccttcttccccggcccatgcaggggcgacgacccggaggtcgaggaggagctcggccgacgcgtgcgctatggccggcttggaagggacgacgagcacgagggcgaaggcctcggccggggcaaagcgaggcggcttcaattcggcgacctgatctggactttgacactcgaggtcagcagcagagcttgcccgctgttgccgtgcgtttccttgtcctcaccttgtctcttcttccagatcatggtccgtaccgaggtccaggacgagccgaccgactcggccgagatcaaggcgctcgccgaccgcatcgtcacgctcgtccaggaggcccaccggcgctcgctcgtcacactcgggtccgtcgtcgctcgcctgctcaagctcggaccgaccggccgcagctgacgccctcttcgcccctgttttcgcagttttctctggccgctcatcatcgccgggacgatgtttgacgccgagtctgaccgtcaggcggctctctcggcgatcgagacgctccggtcctacacgtgcttcgacctccagtcgggccaggagatcctccgcgaagtctggatcgcccgcgacgccggcgaccggaggaagacgtttcgcgacgtcgcacagagctgcgggaccgttgtcctctagaatgtctgggttcgttggcttcgagcggcctgcctaagactgaagccgtatcctgctagaacccggcgcgcatcgcggaccttgcgggccagcgtcgcggcaggatgcaattgtcgatgctgcagacgatggggcatccatacaaggtcccgggggcagtggaaagagtgttcgtgcgtatgtcaagggcagcggtacagagaggaagcccaaaagggagcaaaagcgaagagggttgcgttgcgtgagaaagcgagaaggggagggtggtgaaggggcagagcgggcggagacgtcgccgtcttggctcactcctcgtcgaccggcactgcccgaccggccaagacgtcgcgcaagtgctcgaccgcctctcgctcgaccttgacggccgagatctgtgcgattggatcgagcatgattagctgccgagctctcgagaagtgtcgggtgcgagcgggcggaactcacggtgatgtatgtccagtcgggctctttgaggatgaggtcgatgatttcgggtgcgtcgtccatgtcggccgccgtattgggcgagaagagcaggagcatgtccttttgcgacagaaagtcgatggtagcgcggtcgatgtaggatctggcgacgacctggacaaaaaattatcgcagtcagcacgggccggcgcaagaaaaaagagaggacggcctgccgtgtcggcggctcactttcacgaagctagtcagggacgccgaggccatccggctaatcatcccccggctagcatgctgcctgagcttctcctgtcggcggtggaagtagacgttgtcgtggatcatcgtaccattgtcgtgaacgaaggaacctgtgtcggacagcaggaacttgaccatgtgcctcgggtcaaggacttggccgtggaacctcgcgaccggagcgaggttgcgtctcttcgcgttaggctcctcgaccgggacgggctcgatctcggcctcagggagctcctcctctgtgctgggactgggattgggcgccggctccgggacgagcaccgggtctgtctcgggtgccgggtcggtttcgggtgccggaccagggacagactggtcagggttggggacgggatccttggggaaagcaatcgtgccgcagccggtgggcggcgggcaggacctgcagcaagaaatgatcagatcagtctgggactttatgagcgacaggcccgaggggcagactcacagagcgatcaagtcgtcgcacttcgctgcgcccgacggctccgcccgtcgctgcggcgacgaacgaacctttgtcggcttcaggtctctctgtggggtccgctcgagccagggagcgcgcatggcggccgaggcggtcgtgcaggcggcgagggcgagcaggaggggcgagagcttcatcttaagtcggacacgcctggagtcaacaaagagagcgagtaggagcaggaagacgcgtcagacaatggttcagaacctcggccggcagtcgactacatacttacagttgattgaagaagggcttgaaagtcggttggaggagttggctgaggggaggtgagggaagaaagtcaccccctcaagccctcgaggccctcccttttataggccacccggccaccctgcatagcatgcctgcagaagtaggttcgatgccggcctgtcagcataaaaaaaatagggtgagcgagcagggcggttgtcgtgagcgagtaagggacgcaataggcagggaggaggatcgcggtcggacgggcgtcgagcgccggcagcccagccggcacaacgggctcaatatgaacgacttcggcccagccggccgggtcgcgtgcgttttgctttgtgctttttccacgccttgccttcgcgtggggcggggattttaatttcctctgtccctcgtgtttacactcagaccacgttccggcgcgcctcgtggagacggcgacggcgacagcgaccggtcactcgaggctcgacatgacatgctgacgctctcacacaaggccagtcgtgttgcgtagctcgacgatggctgaccccctgagcgccggatctgacgcctgcggcggcctgccgcccagggtcgggctgcgttctgctcgggcgtccatttgtgtctcgagccagcagaatgtggtccctcgtgttcctcgtatttcgaccaacggccgagcaacctctacatgctctcccgctcggtggctcagagcctcgctcgcctcccagaagaggcaggaaccgaagcgtattgcccccggcgacattgtcggccagcttcgaggaacgcattgaggggcgcccggcattgttcgttctttggccgaggggcgacggaatgaaatgtattgcaggtcagtttcgtgcggtcgataagaagggatagacagatgcgagctgctcaacttcttttcccttcatccctcgagctccttctcctttgcccttggtgcgtcctcccgcgactgtctttgctctgtcctcgctttccatcctaacaactctggccggtcgcgtccctctgtcgtcagcccccgtcgcgcccaacaacaacaatgcgcatcgccgccgtcctccttgcctgcgtccaggccctcgtgcttctccctgccacccaagccttgtcgcgggctccttggctggagaagaaaactgcacttatcgacaggcagcccactcgagcgagggccgctccggctcgtcgggctgaggtcagccaatcagttgtcatctgcacactccccttgtgagcgctcgagcgacactgcatgattttctgtcgactcagcaggctgacgtcgtggcgtgtgttcacctgcagtccctgctgcacctcctcgacgcctttgaagcagttgccgccagccgaagagcagcagccgccggcaaacgaggagtctgtggaagtcatcaacctggttgagccggtcaacaagcgccgcctgccggccgactctctctacgagggcgagattctcgagcctcagcatgccgcccgtttcctgctcagcggtaccggctcttacgtgagtcctccccctgcaaccgattgtacctctctcgagccggggctgactctccttattctcgccacagctccacgacaacggcacgctcatcattgacgatgtctaccagcggatgcggcgcagcaacctcgcgcagcacgcccagaaggggctcatcagcgcgcgggacctcgaggaaatcgacgcctacacgcacgtcagtcgccctctactgactcaaagaaggccctctggccgagcgctgactccttctggctcgtccccttccactccctaggtcgccgacgccgattacgtgagtcctccctcccgactggacccgctaggccgacactaacccccttgcgtctcgccgcagctcacccctgcccactatgcgtggtacggccggcacgaccacctctggacgatctcatccaaaacgtcggtcccattcgccgacctcaaggaggtcctcaacctcctgctcgagcacgagtttgagcacatcaccgtcggaggcctccgcgtcaagcgcgcgatgctcgaggccctcgagccccggctcgtctaccctgctggccatcctgccggcaagaagtaaagcgattcgtcgccgatgatttccggttgagaacgataccctcccccgctctccttagctgtggactgttgctctcggattctcttctccactcactcttggtcccccttgtcgtccttcttatcctctcgttgccctctccgatgttgatctcccttaaaacgatcagcgcgtgtcagtgggcagtcagcggagagtcggcgtcagtcagccgtcagcaacgacagctctgagtgacagcctgcacctctatagcccttcctcccgctgccacgaggctagcacaacagtcgcatcgtagcagcaaggccatcacggccaagagacgcccgccgacgtcagacgaggacatgtcaatctgagaagagtgatcgtcggtggagagctggaaggcctctttgtcaagctagtagtcgtcctctgcgggagcctgcgagggtcgcagcgagcccgaaaaaagaacagccgtcagccctcttcaagcaagcgcaccatcacctcgaaagagaccgaaacggcaaacgcacaaacgtccccgaaaagacgaggatcgtcccgtagacgagcgcgccgccgccgaggctcatccagcatgcgccgggcgcgatctggccggtgtgggcgagaacgagcgggagggccgcggcggaggcgacgagggttgccgtcaggaacgcggcaaagtctttgtaggctctaccggcggcgacgggggcgggggtcgtcaggtcaggtggggagcgctcttggctaaggatggcggaggatggaggggcacgcacgaattgtattctgatgtaaaatcgtcggcaccgccgagccgtgcgcagagcgagttcggtacaggtgcgaggaggaagatggccgctgtggtgtgggatggaggggaggcaagggttggaagagcatgcgcagccggaaaggcgagtgacgagtggaggcgacggcgagccaatgtagttggtgaacggtgcggccgagcagatggagggttgaggtagatgatcagctcgagaccgtccacatcgtcacatcgttgccgaagccagccgatgctggcgaataccggcagacgaccggtcaagcgaacgaggcgcagctctctcggagttggcgtgccccgtttcggccgagcgcggcgacgagcttcgaccggtcgactaccctcatcgagaggacgtcgacaagcagcctaatccactgctacgacgagtgatgccagccgtctttccagtcggaaggctaaaggaagaggactgaccgacgacgagcggcagccagtttgaccagagcgcgcaagcgaggatgacgagcaagaacccgagcgcgaggacgaacgagaggaagattacctggagcgggcgcgccggaggcagcggtggacgcggtggaggagctgcaagtcagcatacgtgattgtgcaagaggtgcagaggctgcggtgtcggatcggcgagatgggccgagggtactgaccgctgcgaacacgagatcgtccagccagcgtaagaccagcagttgacagtgtcagcagcggattcagggcagctggaggctgcagcacgtactcttgagacctgccgtcatgttacttgagcggttgttgcgaggggcgagcgaggagagaaggagagggtgtcgttgtcagtcggtcgggagctcacgacgacgcctggctcgattcccccggggctcaattcacaatcacagtcgagcaaagctaacctcaatcgagagctataatccgtcgggctgagcgtcgggctgggcgacgtccctctctggctcgctcaccccgtccctcatcccacacaccttctccaacccttccttcagtcgcaacagctcgaaccctgcctcatggccgacatcaagaccgacctcgcggccgggctcgcggccttggcggaggacgagctaaaggcgctcatcgtcggcagcaagcaggcctcgatcgagtgcgtcgacccgctcctgcttccctctcccccctccgggcgtctggcctgccatcgcctatcggccccaatttgcctcagcggcgaggtctctgcatgctggccgtcatgagctcgaggctgataacgccacgccgacgtcttacccttcccaggacactccatcaggcccgggcggagacgctcaaggagctctggcgcgccatcgaggactacaccacagaccggcctgccgccggtgctggctctgacgccaaacctgtagtcgaaacagaggcggaggcggaacctggctggaaggagtttgagctactgtacgggtgcgttgcagtcttcctggtcgtcgcttgggcgggtcgctctgcctcggcggacagctcgccttccgaggatcaaggctctacgcccgttcacatcgtccaagggcggtctcactcgctctgctcggccggctgacgctacgcaccctgctttcgttggtctgccctgccgttccgatctgccaggttgagcgtcaaggacctcccgctgccgccggcgccggttgctccctcgacgtccacagcggtcactattgcctcggacgtccagccctcggacctacaacccaagatcgatttctcgttgagcagcagtgcgcccggtgccgtcgtcaagccgccgtcgggccagggcgccctcccgacgctcatcctccttccgccgccctcgcccccgctctctccctcgtcgcctaacctagctgcgctcgcggccctcccgtcgccttcatccggctcgagcgccctaccgcctgtgccggcaccgatcgcagcaaacgccggcgcgagcggctcgagcttctttcctccgagcccgccgcccgaggacgtctttgcgcttcagcaccaggccctcccgctccctctcgtctcgccctttgcaaagtcgctctaccccctgccgcctctgccggccgacgtctcgcgccggtcggcagcggtcgtcgcatcgacctcgggccggtcaaacgcctcgtcccgcggggcagggagcgtgtcgtcccgaaagtctggcggcagcaagcaggtcgcatcgggcgcggcgggcggccacgagggcgttgacctgacgcggtggtacgcccaggtcaatgcgaaccccgtctggaagctcgtcggcggtgcacgaaagtgtctcggctcggatgactgggcggtgagtcatcgcaccacgtcggaggttgtccgtacgcgcagcgctaaccgctcgtgatgtcattgtcgcgtctccagacggcccaccaggagctgcgcttcctgcgtgcgatgggacggatcgagcagctcaagcaggagggccgctggtcgttccgccagccgaagaagcagaagggcccgcccgtcggcaagtcgagctgggactggatgctcgaagagatggtacgtccggcgcgatctgaggcgagttgccaaagcgacgattccctgacactacccgctcgttgtctgtcgcgagcagaagtggctccaaaccgacttccgcgaggagcgcgtctggaagattgccgcctgctgggagctctcgcaggccgtactcgcgttccatcacgcgcgcgacaagcacgacgtctgcgtccgggtcggcggcaagtgggcgctgagcgccgacgatcggcgggcggcggcggccgttgtggcgcgcgaggagacagagcaggctgcgcaggaagaggaggaggaagacacaaaggaggctaccggcaacgagggcgcttctacggacgggcaggaggagctcggtgtcgctgcgcggctcaagcgtcgtcggcgaggtgggcccgagtcgcccgcgataacgccggccgccgagacgcagtcggaggatggcgacgccaatgtcgagcacgacgaggagatggaggtcgatgccgacgttgagcttcccgcagcagcggcagcgactgtgccgacggcagatggcgacaaggagccggacgaggacgccgacaagaacgccgtcgagatggaggtggccatcgagggtgacgacgaggatgccgtcggcgagccgatggacgaggacgagccggccgttgccgagccaccgccgatccggtcggccatcgtccctccgacgccggcgagcgaaagtcccgcggagactgtcgtcgagaagaaggcgccgtcaatggtggccgccccgccgcggcacgacgacctgccgacaccaccgcccgactccgtctcgcacccgtccgagcttgcgcccggccagacgcagacggctgcacaggccgctgctgaagcagcgcaggccaaggccgagcgtttggccaagcaacacggtcggctgcggtctgcgctcgcgacgctcgcaccctcggcactcacgctcgactttgcgccgttcttcgacgagccacctctaccgacgccgtcatcgtcgtcgtcgtcgtcagcgatggccggtggaggctcatctaaggcaatcggtggagagtacgacgcgcccgagctgtcggcgcttgcgcttcaagagctctttggcgacattgcgccctacgtcccgccgacgccgctgtcgccgtcgcttcacgcccagggcaagattgaccgccggatcgacgacgcgacggcgtctggcggcaaactcgcccacacgagccggctgatggacatccggccggtgctcgtcagcacgctcaacccgggccggaagcgcaagggcgagcgctgggacgacctgagcgacctctggggcgggagcgaggatctgcgcgacttggccgagatgaagggcgaagtctacagctcgggcatccgtgcgtcacccctgcctcctactcgcgcgatgcattcgcaggactaacgttgcgcttccccctcccatctgacagccctctttgccggcaagaaggtccgcgactcagcccatctgccgatcctcgtcaagccgccgctaccgcgcaactttgagacccggctggcgtcgaccatctggcagcaggacgacgacgttgtcctccagcggctctgcctccagttcccgttcaactggcagcttatttcggacgctttcaacacggcccggcggacgctctcgatcgaccggcgctcgccctgggactgctatcagcgctggaacaaaaagtggaacccgaacaaggaggccgacctgccgcccgacgtcgagaccgagggcgcagcctcgcccggtgggaccatctcgaaaaagatggccaaggtgatgcccgccttgctcgatgcgaagtacgagggcagcaagaagaagctccggcacgccaagctctacgaggccatgcgcaagacggccaagcggcgcgacatcacgaaccgcaagccgaaccgtccatccccctttgccggcgttgtctgcagaagagagcttcgctgacatagcctcccgtctctcgatctgcagtcaagggcgagccgcgccgcgtcctgacggcgcacgagtcgcaccatgcgtttgtcgcctcgcgtccggggacgccgcaggagctgagccaggcaaagttcgagcgcgatcgggcttaccacgagcgcgagatgcacgagcaacaggcgcggcagcaggccatgtatcgggcgattcaagctcggcagcagggccagacagtgcgtgtcgcctcctccgtgttctcgctgtggcttcgtcgctaatcaggtctaccattgcagaaccccaacgcgccccgtccgcctccgcccggccagcagccgcaccctcagggtcagcccggtgcccacccgggccctggagctcacagcaacggccaagcgcacggcggtcaagcatcaggctcggccgtcccccgaccggcgccgacggcgcaacagcaggctgcccaccttgcggccctcgcacagcgagcggccgctgcggccaatgccagcggcggtcgcatgacggcggcccaactgagccagatgcaggccatccaggctgcacaacgggcggcagccgccgccgccgcagcaggcggcccggctcccggtggaggcccgcccatgcagcagaggacaggcacccctgttcagcagctgcagcatcagcaacagcagcagcagcaacacctcgcccaacagcagcagcagcttcatctgcagcagcagcagcagcgggtgcagcagcttcagcagcagcagcaggctcagcagcagcaggctcagcagcaacaggcgcagccgccacagcagcagcagcagcagcagcaacaccatcagcagcaaggcccgccgcagggccaccaccagccgccgccaccggccgcgaagtgatcgcactagtttcgttctcctttacgactttctcccttcccgacctcgacctttcgtctttcgctcttgtcccggacctgtaggctccctctgtaccaatctcttacaatctggcggccgattctactgcgcagacagagaaggagggactcatggagatcggagcagagacggaatggaaggcagtggggacggcgccctaatcggccggcttggcccggccctggaagacgctgttgacaaactcggccgtcgaccgctcgacccggacggcgccgatcgtcaaaaagtcccactcctcctggacgatgagccgggcaatctctggccagtcagactggtcaaccgccgtctgtggtcgggctgtcaggcgtcgtaatgctgagcatgggaagggcggccgctcacctgagggctgaagacaaagagcgtgtcgggctgcatgatgtgttccatcatcacgctcgtcatctgtcgcaggcagaaggaggagaggaggccagcgaaaatgagctaccgtcaagggggacggccgcgtgcggcactcacgtaggttgcgccgatggtctttgaagagagggcgggagtgtcagcggatagttgcgccggcccctctcgtcacgtcttcagaactgcctgtcgtacctgagcaaaggctccgagcgagcggagcgaggcctcggccattcggctgagcatacctcgctttgcgtgccggacgagcgcccggcgccggccagcgtcgtacttgaagtctcggacgaccgtcccgttgtcatgcgtgtacgtgcccgagttgtcgaggaggaaccggacggcgtgccgggggtcgagaatgtcgccagtgaactcggtcgggatgtcagaccggcgccggcccggtgtgacggtcgtgcagcaaagcggagccgtggagtcgaagcactcgccaggcccgcaactggagacgggtcgtcgcggcgtcaggtccgggcgagagggctagcaacaacaaagtcgggcgtgacgtacatattgaaggggtcctcgcagttcggagggctactctgccgccgctcgagcgcacttcgggtgcgggagaccttgttccgggcctcgggcttgtacgagctctgactgatccaggggaggcgggcagcttgggcgaggaccgcgcaatgggcgaccgagaggaggaggaggacgagcttcatgtcgggcttgttctggcgacgtttgagtaggcggggcgtcttgtcgggagagatggttgacggggacaagcctggctttatagagacggaagggatgggacccgcccccctctgcccttccttgggtcctggaaaaatatttgggcgctggtcagcgggagggaacgtcagccagggcaaaggtcgaaggtaaggtgacttagggttcgccgtcggaatcagctgaaggcagacagacgggcgctgtcaacaccgaccgtcgcagcttcgatcgcgccttcccgcccgagcttcagcctctcccaaatgcactgcgccattcgaaatcagaggccaagcgaaggccgagaaagagtgtctagctagatgtgcgagccgatttaggcggcagccgagccgtcggctagcgagagcgcggcaacgtccgccgccgcttcgttgacctccctctgcgaaatgagctgcaggtgtgacataaggctggtcagctctggtgcgtccaggccagaggtagagggaagaagaccgaccttggtgaccttgccgatcgcgatcgtctttccctcgtcgcggagggtaaagcggccgagctgggggtagtcggcaaacttctcgagacagaccgtctgagtcgtctcgatcagggcgatgatctgctggcctagagggtgagcgcacaacgaggaggaaggcgcaagatcagccagggcgcgatgttctggcggccgaacgcaacgcacctgtcttggcgaattggggaggcttcttcgacttgcggccggtcttggcctcgaggtagtggagaagtttctgaagcgaagcaggtcagccacggcggccctctcgataaagacagagcgacccggggaagcaagacttacgacgagcgtgacctcctcggcggcggtgtgggcgtgcatgacgcacgagtagccagcgcagatgatgctcttgctctcgaggatcgcgagctgagcctgaaattgggtcgtcgtcttgatcggcttctgcggcgtcgtcaggacgtagcccggcgtcacatcctcgtcggtgacgcccttgaggcggatccggacattgtcgcccgaaaaggcggcctcgagctcctcgttgacctcgtcgtagatggtcgtcacctcgaccgacgtccggttcggcatcatcaggagcgtgtcgcccttgtagatccggcccgactcaatcttgccgacgatgatcgtgcccaggtcgttgtacttctccgagatgggcagcatgacggggccgttctgcgtggagggaggagcggcgtcagatgaaatgagcagacgctccgcagggcagacaggggcagacgacgcacgacgttgcggtccggggccttcatgccgtcgaggaaaggcaggagcgccggcgacgtgttccacgggcagacctccttcgagacctgctccttcatgttggcgccagtgaaggccgagaccgggatgaaggtgacgtccttcgggttaaagatgcccttcttgaggaaggtcgagatctgggacttgatgaagtcgaagctggtggacgggggaggtgattcagaactcaatccggagggagacggtgagacaagcgagcccgtgtctgctcaccgctccttgtcccagttcacagttgggtcgtccatcttgttgatgacgatgatgagcctcgtgacgccggccgtcttgacgagctgggcgtgctcgcgggtctggccgcccttgtcgaatccagcctcaaactcgcccttgcgcgcagagatgacctgagaaagaggggatggtcagagaggtgcctcgcgagctgaagcgaagaaggtgaggcagacgcacaaggagagcaacgtcggcctgcgccgcgcccgagatcatgctcgggacgtaggtcttgtggcccggagcgtcgagcagcgtgtagcgccgcttgtccgtctcaaagtaggcccggccgacctcgaccgtctttccctttgcgcgctcctgcggcgtcgagtcgagcgcccacgagaggtaccacgactcgcggccggcctccttggcctccttttcaaacttctcgagcgtccgcttgtcgaccatgcccgtcagatagagaagctggccgcccatcgtcgacttgccggcgtcgacatggccgatgaagacaaggtctggcaggagagaccgagcgcgggcgggtcagtccgaggagcacggcaacagggtctctgcgctcggaatagacgcactcatgtgctccttggcgttgacatcctcagcccgaccgccatagaggtccttgaggacttcctcgtcgaggtgcttctgagcctcggccaggacgccgtcggccgtcgtcgaggcggcctgccgcgagaaagcgttgtacgtcgacgactcctgcggcgccttcttggacggcgtcgaggtaccagacgcggcagcaggggcgacggcagcagcaggcgtcgcgggccgggtcgacgaggccgagtcgggcgcggatgaagaggcggcggcggcggcgcccggagcagcagcggcagcggcaggagcggcagccggcgtcggcttggctccgagcgagataacctttggcttgtcagtcttgggtccgccgagcgagaaggaagcggccggcttgggcgcctcggtcgcctccttgcggacgaacggcttgggcgcggccgtgctgccgccgccgagcgaaaggacctttggcgggagggcggcgagctgctcggcctgcgagggcccgccggtcgatgctgagggcgaggcgtaccgcggctggacctgcggcggctggaagccctgctgctggggaggctggtagccaccgcctccggcctggtagccaccctgctgctggtagccaccgccggcctggtagcctccaccctggtagcctccgccctgctggtagcctccctggtagcctccctgctgaccatagccgccctgctggtagccaccctgctgagggtagccaccgtagggctgctgctggccgccgtacccaccctgcggctgcgaagggtcgaacggtggttgctgctgctgctgctgctgctgctggccgcgagggacgaacgagcccgctcccggctggaagttgaaggtcggtgcgttggggttgaacgccatcgctgaagaaagaaagaaagagaggaaggttgatggtcggtggcgaggatggacggggacgaggtcgaggtcgaatccaaggcggagggcgagcgtcatattaaaaaaggaccgcggttcgcaggaagagaacggacctcgttctactctcgactctcattttgtcaagagccgactgcactggctagcgtctagcactgggagccgacctcgacttgccagtctccacaaggtcgggtgggtgagggaccggcccgacggcggtcggtcggatcctcttgtcgaagggaacaagcgcagcacgcccggccagcgcgcctccgagcaaagtctcttcttccatcgtcctcgtcggccaccgaccacctcgcccgccttgctcccagcaatcgtctaaccagcacgttcaatcgcgtcggcctgcttagtcaagcttgttcacgtttctgaaccctaaccccatctcgatgtcgtgacaggctcatgagagaaagaaggggcgtcaaagggagagagagtgagggtgcaacgggggtcatgtttccatccgatggagggcagaagcggaccacagcgtgtcgcaagtcgcttagagcgtcttggagacggcgttggcgtcctggccggccgccttggcccgaatgcggagcttggcgaccgacttgctgttgaagaccaaaggagggaaggagcatcgttagcagccacaactgacgccgccgggaaaagaatggaagagagaagacgtacttgccgcggacaccacctccccagtgcttcgagacctcggcgtacttgtcggcaaagttagccttggaggccgagacgagcgtcgcgagcgcggcctcgtcggccgacgagacgtcctggatggcgaccgcggcggccgtcttcttgtggacgactgttccgagacgggccttgttcttgacaatgacgtacgggacacccatcttgcggcagagggccgggaggaagacgacgagctcgatcgggtcgacgtcgtcggcgatgacgaccaggttggccttcttggcctcgacaagggcgacgacgtggttcaggccgtacttgacaaagttgggcttcttgtcggccttcttgttgtcggcaggcttgtcgccggcggcgaccttggcctcagcctcggacaggagccgggccttcttctcctgcttcgactccggcttgtacttgttgaggagcgtgaagagctgggtggccgtgttcttgtcgagcgtgtgggcgaactgggcgatcgccgggggaacctacgaaggcgggcgacaagggagttgcttagacgcggcgcagcggagggggtgggcacgacgtggaacacggcgagacactgaccttcaggcgctggtgaaggatgaccttctggcgctggagccggacgtactcgggccacttgacgaagcgggtgaggtcctgcttcggaggcaggtcgccgccgatgccgaacgaacgcgtcttcttctcgaagagcgggttcttggccgaggcggacttcttgccacccttggggtctggagcgagcggcggggagaaggtcagccgagggccgtagggcacgtctgcaagaggcatgagcggagacgtacagggggcggcggcaaccttctttcctcccttggcagcggtcttaggctggaggacagacaggagggtgtggaagaagagaggagggaaggaagggggggtcattgagtcaggacaaaagagctcttctctcgggaaagaaaaagagcccctctgccctgtcgctctagcttctctcccaccctttcaaccgttcgtcggccgtccctcgtgtgaagaggagacggcttcaggcaggaagagaggacgggaagagaaaccccattgagggcttggcccaagcaaagtgacatgccgaacgaccccgggaggtcgtccggcagtcggccgcagctaggctgggcgagtgggtcgtctgtccgctcgctcgtgcccttggacgtcctcgcgcaggtcgacagcgacaccggaccgagctacaccggagcggagccgagctcccgagcaagagcacgacagggggaagggcgcacgagctaggctcgcggtgggatgcccgaccctcaacggccttcacacgggaactgagcagggacgctcgcgatgcaggacggcttaggcaccgggcgctggacgaccgcaagctcgatagaccagagggagcgtccatggaggggtagaggtcactgcggcagggaggagtccgtcgagagccctgggacggaaccgcaacaaaggcggccaacgcccaagactcaggccgtcgagactcgcagacgaccgcttgagggaaaagacggcgggaatgtagaagctggccgagctctccaaggagagcgcacgacctgcttgcgtttcgcggcgcgcccgagatcctgcgtgccctatagtgtgggattttgggcgacaggggaaagagggaggcagcccggaggcggctcgaggagcgctgctaacgaaccatgttggatgaggtgagactggggggatggtcttgaagagggttggacttgcgtggcgggcgagagcagacgaggccaaaaggaggtcgcaacgggtgtcggccggctgcgggcccagtccgcggagctagggttaaagcaaaaggggcagagtccagattttggacgacaatcaaaatcgacccgccctgaagaacgcttgagatccgatagagcagagccagccctcgtaacagatcgaagaccgctcgaacgcgcccgcttggcagcctaattggccggccttctgattttgctcgcactgctcgaattgcgacgtacagggtgcaacggagaggggacctctgcaagaggggaggaggggcgaggtggggtaggcgggatgtaagggaagacggtcggaggatggaccatcgtgagcaggctcgtcaagtttgcatgcgtcgtctcgacgccctttgacaggccttcggtcccgctcgaaaagcagacgacggccggcgccgccgctgccgccgtctcagagaaggtgccagcggggcaggcgcgtgcgcggatggcgtcgacgacggcgctggcttcagtgacgaggacctcggcggtaacgacagcagagctggacggagggttgaagagcgacgaccaggtcgggaaaggcaaagtaccttcaactgacggcgcagcggctcccgaagggtcctcctcggacgcagcggccggcggcgggggcaggacgagcgttctttgcccctcccgcgccctgcgcgtctccaactccttcccatcgaccgaaccttctccagcctcgccgtcgacaagcttgagcgcggcagcgagcgtcggcgcgaggccggtagaggtaagcgtcaagcccggccgggcgagcttgagctggtgggcgagctcggtaggcgtcctgcgggagggcgagcgcgagaggaggagggaaggtggcgtcagtaaggttgagaagggcgatggcagctagctcaagctgaggactgagagcaagatgagagatgcccgggcgcggcgcgctttcccgcgaccctaccgagtcaagtgacctcgacctcggcgagagctcagaggacgcatcgcccctccttgcgcccacaagctactccacacgtccggcgaagagatttcgagagcctctctcgaacctcacgagcgactaagcttgagcaaggacaacgaacgggatacgcacaggctcgccgcgaagagggcggtcggcaggccagcccgctggcacgcgaggaacgcgatgggccaggcgaggccgttggcgagaaagagaccgactgtcggcggaggcgctgttggacttgcggcgtctgctgaggactctctcgttggttgaaggcctcggtcgacttgtgcggctggcgagctcgacttcgcgtcgagccggagcctgacgacgatctcgcgtccgaggagggccgacgaccgctcgagctcagccctcgtcaactcggtcccgctgctgctgtcgacaaagacgggcaagctcgggtcgagcgccggcttaccctttgcagcagcagtggcgggcgggaagaggtgggcgtagagtgagggcgaggaagggagagggtcgaccggcgcgtggggcgagcggtagatgagctcgctcgccgagcttgaggcaaacgcccggcggacggatgacgacggccgggcgagcgagcggacgatgctcaacgcggcagtccgggcgctggtcatcgcagagagttaagatgacgggcgggaaggagagagtagggaaggcggcccggcgagcccggccgagctttgcatccgatccacactcgctcggagcctatctccgcgggggtgacgtaagacgccagcgggatggtcgagccggccgcggagccgaccggccgtcacgctggacgagagctgcctgcctaccccggcccgttgctggcctcgcttcgagagcagagagggaaagagggagagagagtgagtgagcagcgacgggcgagcagacatgcgatcaggctgccaggaaggacgcccgcctccgggaagatctcatcgggtgctgcgcaagcgtcgtcgtgtcgttccgccgccttcgcgcttcgtctcgaccttccaaacggttgaaagcgagcggacgcacctttctctctcttcacccttcatccttcgtcctctccgtctacctccttctcctaccctccctgcaaagcaaacctccacgcagatgtcactcaagactgtcgcccagggttcgtccagcttcctcctcctcctcctcctcccaacgagggcttgcgcgtcctcccctgttccaccgcaagctgacgcccgtgcgtctcgcccactccccttcctctcggcacagccgaaggcggctcgttcgacgcgacgtcatttgacggccggacgccgcccaagccgtcgtcgctcccggcctcggtcgtcgaccagctgctcgtcaagctcgacctcgacgcgttcaaggcaaagggcgagctcgatctcgagggcgtcctcgcttaccagcgggcgtgagtctcttcccttcttttactcgagtcgagactcggcctctcgctctcctccggccctgctcatcgctcgctgttggattcccggccgggtcgaagaaaggcgggagattgagccagcccctcgatcggaattccggcgctgacgtactctcctctcgcgacacgacgcccgcccccagcgccaactacatcgcggccgccatgatcttcctgcgcgagaacggcctgatcgaggagcgcattacgcacgaccacatcaagcgccgcctgctcggccactggggtagtacgtccctcccctcccctcgcctagctgactggctcgaggatcgggctcgcgcagcaagcagcaaactaatctgaccgcgcttcgcctcgcctcgccagcttgccctggcctgacgtttgtctacgcgcacaccaacatcgtcatcaacgcctcgcccgacaaggagtgcgctcccctcctctcctcgctccgttatccccttcgactgactcgcctacccgcccgccagcttcctctttgtcaccggccccggccacggcgcgccctcggctctcgcttgcctctatctcgaaggcgccatcaccaagttttaccctcaatacacggccgaccgggccggcctcaagaagctcatccgggccttttcgttccccggcggcttcccctcgcacgtcaatgccgagacgcccggcgccattcacgagggcggtgagcttggatatgcgctctcggttgcgttcggctcggtccgtgagtccttccgtcaggtctgctccgcgctttgtcggatcacgattctgacaccttcgcgcttgcatcctcgctagtcgacaagccggaccgcatttcagtcgccgtcattggtgacggagagtccgagacgggcccgacggcgtgcgtcccccctcattgccgcttgagtgtccgcctctagactgacgacccctggaccgcccgcctcttccttagcgccgcctggcacctccacaagtacctcgacccgcgcgagagcggtgccgtcctcccgatcctccacgtcaacggcttcaagattagcgagcgaacccttccgggaacgatggacgacctcgagctcgcgtgcctctacactggctacggctaccaggtccggatcgtcgagtacggccttaacccccccgagaacgcctcgctcaaggagctcgagcacgccgtcaacgtcgacatggccgcgagcatgagctgggcgatgggcgagatccgcgcgatccaggaggcggcccgcggcggaggtgagccgatcgtcaagccccgctggccggtcatcatcctccggacgccgaagggctggaccggaccggcgacgctcgacggcaacccgatcgtcggcagctggcgcgctcaccaaggtacgcaccctttctcgccctcgctcagcttgcgcgactcgctgacgcccccccccccctgggcccgcagtcccgctacccaaggcggccgacagcgacgagcagctcggcatgctccagagctggctcgagtcgtacggccccaaggagctcttcgacacgtcgtcgtcggccgacagcaggtcggaggacaagctcgaccagtcatcgctcccggccgaggtcatcaacgccaaggcgcttcggatcctccctcgcaaggagaaccggcgaatgggcttccacaaggcaatcccttcacctgctgctcacttccgtaccgagcgcatctagctgaccctctctcgctcaatctcccactcggcaggccctcacgcagggccacgagccgctcgatctgcccgactggcacgactttgccgtcccccagggcaaggacgacgtctcggccatgaaggcgatcggccagtacctcctcgccgtcgtcgagcgcaacccgacgtcgttccgcatcttttcgcctgacgagctcgcgagcaacaagctcgacgccgtgtttgagaaggtgcgccgccgccttgctgtctcgccgccttctcgttgctcgctcgctgactgaccttcgtcggctgccctccttttgctagacccaccgcgcgttccagtgggatcccgaaacggccaacaacggcggccgggtcatcgagatgctctcggagcactcgctccagggcctgctgcaggtgcgacttctttgcccccgctgaaaggttggacgctgttgaggctgacttgatcaccccttctgacccggccagggctacacgatcaccggtcggaccggcctcttcccgtcgtacgaaagcttcctcggcatcgtcacgaccatggtccgtcctatcttccttcgccctggtttcgcgcgggcgctgactgccgctctcgatctgctccgccaggtcgagcagtacgccaagctcatcaaggtcgggctcgagaccaactggcggtccgagacgtcctcgatcaactacattgagacgagcacactttggcgccaggagcacaacggctactcgcaccagaacccgggctttatcggctcgctcctcgccctgccgagccagcagacgcgcgtctaccttccgcccgacgcgaacacgagcgtctcgacgatcgcgcacgtcctccggtctaagagccaggtcaaccgtgcgtccgagcgggcgggcccttgtttccaatgacccgcgtggctgacgtcttcccctttcgcctgaccggctgcagtcatcgttggcagcaagaacccgacgccgtgctggctgacgcccgaggaggccgaggagcattgcgttgccggcgcctcggtctgggagaagtactcgactgacaagggcgttgacccggacgttgtcgtcgtcggctgcggcgtcgaggtgacgtttgaggcgattgcggccgctgcaatcctccgcaacgagggcgtccgggtccgattcgtcaacgtgacggatctgatggtcctcggcgatgagggctcgcaccctcatgcgctctcgccggccgctttcaacggcctcttcacggctgagaagccggtcgtcgtgcgtcgtcgccctctcaaccttcacccctcaccgtctttaactgaccctctccccactctctcgcgcgatcagttcaactggcacggcttcccgaaggacgttgcctcgctcctattcaaccggaccgcccacgtcggccgctcgcggttcgagatcctcggctacatcgaggagggcacgacgacgacgccgtggtcgatgctccgcgtcaacaaggcctcgcgctacgacgtcgcactcgcggccgtccgctacattgcgatccagcagccgaacggggcgatcgcgccgcgcctccagctcctccagggccgctggcagcacgccctgcgtgagcacgagaaggtgcgcggcgcctccggtctttctcgctgactgcgagcctcgtgctgacacttgacttcccctcccatacagtacacgctcagggagggccaggaccccgagtggtgcggctcgatccccgagatcaccgcctgatggccgccctcgacgccgctcgacgctctcgcaactcggcccctcgacccgtctccctctgcctgctgacgtcctcatcggccgcaaggggcgttctttacatttcgtctgcccttcactgtatctatccatgcctcccgatcgatccttcagttgctgacggtcgacggcatacgttctcgagtggcgaagtgcacgcctctcgcgctgactgccaggccgtccgttgaaagccttcatggcccgacaaaccctgcgatggtcccatggtcggagggcggggggttgagctggatgcgcgcagcgtcgtctggcagtagcaggagcagcaaggggtatgacactttagctctgggactcactcgcacgacaaggcacagccaactgtcttcagctctcagaagtgacttcttcctgccgattggtcgttaaggaatgaagcgtagaagtacctgacggcgcgatctgtacgcgctctcgagctcggcgcgcctgcgcctccgctcgaaccccctaacccccctaacctccatcgcgccctggccatctcgactagccagccatggccgccggccgctcgctccgccctcggacctcaacgccgtcgtacgcactcaagctcgatatcggcgagagcgacgacgggctggacaactcgtcgggcgaggatgagcttcagcaggcgctcgccgctcagaacctcgaggcggccgacgcgtctcttgccgacgaggacgaagccaccaacgccgtcgcatcgacctcgacgccggctgccacacctcgtggtcggggccgcggtgccggccgggcaagaggcactcctcgcggcggtcgcggcggccggggtagaggaggcggaggagctggtcgcggccgacgttcgggctcgttctcgtccgggtccgacttcgccgccggttcggctggcgagccatccgaccactcgtcggaagaggacgacagcagcgacgcctacagctcgagcgtcggctcgctccgggccgtcgacaacgaagacagtgatggagggtccttcggcaactcggacctcgagctcccgtcagccaggcagcgcggtcctggccggcctcgcgcgtcgtcgacagcctcccgaacgctggcgtcaacgcccaagcagcccggcgtcatcaagtccaagctgaaacggaggacggccggaggcaaggctagtgccggtggcatgacggtcgacgagcgcaagcgcgaggacatctggaccttctccgagggcaacgccccgctcgtcccgcacttcacctcttacctgacggccccgccctcgttccgcgcacggtcagacgtcgtctcggccgatgctgcaacggttcctcagcggccgctgcggatcgaggagatgactggccgggttcgaaccttcaccgcctcgatcatgggcatgacgccctgggacgcttgggccggcgagggctggcggccagattcttcgtcgttggcgccggccggcatcaacggctgggagggcgtcgagaagaactggaaggggctacagatgctgacgccagagtacgctaccctccgtatttcgattgcttgcggatgctgatgagagcggtttcgcacctgccatcacagacaagccgcatctcacctgccggcgccggccgacaagccgccgctgaagctgctcgccggtcacttgacaccctcgagcccgcagacggagcgcacgctgcctaccctctcggcgagctcgctcgccagccacggaatccgcaagacgggcgccgtcttcaacccaggcgggccggtctggagcgtcgactggtgcccgacgaccgaggaggagtccgagagtgcgtcacgcctttccctgctcgccggcctccttttacttattccactgttcgccgggattgcagaacgcaactggaagctctacctcgccgtcgcggcccactcgagcctcgaagccgacgccgtgctcggccagtccaagccggccggaacgcccggttcgattcagatctggagcgtcgctcctacggccagccttctcgcgcgtgagcggcgccattaccgtccgaaagcggctccggcccatcagcgcaagcccaagatgggccggccgtcaaaagccaagcctggcgcggccaacggagagggtggcaccctaggacggggaggccggcagtcaaaggtcacaactccaccggcgacggacgacgaggtgtcggcgaaggccgaggacggcgacgccgagcaagcgttcacagacgcggcggtcgagtctgtcaagatggagacgagcgctccagacgaatccgctgcctcggtgtcagcaaccgaggacgtcgcgatggacgatcaggaggccggcaaggaggaggagggcgacgtcgcagacgagtgggagctcgaggcgagccttgccatggtcgtctgcgtcgagggcggccagccctgtcggctccagtggtgcccgagcgactcggccgatccggtgcgtacttgaggcttcccacttcatcagagtcggcccaagagcatgctgacaatggtctcggcttgtattgagcagctctcgagtgcgacgtcctcaacagctccaaagctaggcgtcatcgccggtacctttgaggacggcactgtcaaactctttgccgtcccggatccggacgcgctccgggcgtcacagaaggcgccggctactggccctcttttcagtgcgtgacccacccacactcgctgtctttgacagctactgacgctgccatcgttcttgcagtccggttgcagccgatcacaactctcgagctcgacgactccatgctgctctcgctcgactggggcagcgaccgaattctcgctaccggctcgtccaacggtacgcaggcttcgtaatgcaagacggattgcccttcaaagcgtctgttgacaccgagctctgacctgcacccctcaggtcggctcgccacttgggacgtcaaaggcgcggccctctccggcgacgaggattgtaagtcgattctgcaggccgtcgtctgctgctggcgctgacgctgcgtctcatcgtcgacagcccttccgttgcagctcatgcagatccaggactcgccgattcgctcgacgagctacatccgagcaccgcaggccgatggctcgggccagtaccgctttgactgggagcagcacctcgtcgcgaccaccggcaacaatcgactcatcttgaccgatctgcgtgagagcgagggggtcgggctccagctgcgtatcgggcgctgtcagttcagcagtgcctgatgcctcgcctgtcaaaagaggaacgctgacgaccgctcggcctgctcataccatccgcccagcctcgaccttctacgcctcttctgcctctgtccagaatgggacagtcatcgtcggcgacggcgactatcaggcctacctctatgcgatgcggccgcggggtgcggggacgatgcgccggactgtcgcacaccagggcgccatctgggtgagccaacgctcagaggctgcgaaaaaggattttcagcggctgaccaggctctttctttccaggacttgtcgacctctgactatcatccaaatctcgcctcggctggcgccgatggcgcgctcctggtcaccaacaccctccgcggaacgaccaagaatcgcgccggctgggtgcgtcccgcttcctcttgcttgagtccgtccgcccctgctgaccttgcaaacctggccgccccccaccaggtcacgctgatggaaaatgtctaccggatggacaagaacggcgagacgggcgagctgcgcatgctcgataacctgctgcctcaggtgcgtcatatgcgccgcgtcatggcgagccgccggctgatgcccctgcccgccctcctttcagagcctcaccacgcagcactcggtcagaaaggcggatgcggtcggcgcgaccaagtcgttctcggacaagccgctcaaggatctcaatgcccggcatgcggcctcgtcggcctgggcacccgacgtcggtattctctcgaccgcatggaactcgtcgtgcggaatcggtcgggccggtctgctggcgagcggtacggcatgcggcctcgcccggatcgacgtcatggtcgacggccagtggcggccgggcgccggccggacgcgcgagggtctccgcgagcggctccgggccaagcagatattcctctgaggcgtggtccgccctatgcccatcattcctcccttcggtcgctctcgcattgcaaagaagtcattgtcaggagccaaccgcaaacgaaagccccgcgcgtccttcgcccttgaccggtcgcggggtcacgcgcaggaccggctcaccgcccgtgaatggcaacgcgtcgagcgcgacgctctcgaggtcgtgcttggccgccagctcggcgtccagattgttcatcgcctcctggatgaaggccagctcgtagtcggccgggggcgagacttcgacggtcatcgtcaccgcgctgcggagcgggcaaaggtgcgtcagtctgcgacaggacggcgcgaccctcgaccgacggacgcactatgagacgcgacgtgcccggcgggcgatgtatgcttgccgggtcgccagccagagaatgacgttgacggtacccgacgaagcgaagaggatgcccgaaaacataatgaagccgagcgggaccggcgtcttgttcatgaccgagaggcgcgagatcgagacgggcaggatgcaggccgtgtagcagatgggatacatcagcatctgcagagcgagtttgagagttagcaaggacagaggcaaagggtaagggaacaagaggacggacccggtttgacatggcggtaatcttgttctcggcagcctccgtctgctcttccgagagtgttgcgccgccgagcgtctcttcatcgaccatccgttccggtacagacatcgggctctggactggcttgagcgatcgcttggccgtctcatcttctgcctcggccaccgtcgaggtcgccgatgggacgtctgcccggccggccgcagtcttggcgccgaacaggccggtcgagagcttcggcgagctcgatgccgaggcgcttgttcggcgcgagcgcatgtagatgagcgagttgcagaaccagctcgtccccgtgctaagaaaaatgaagaaatagaggaagaaaaatctctccacctggtagctggaggcgatccagcaccaagcgcccgagtttccgtagaaggcgcccttgccggtcgcgggcgcaatgatgaccgggccgacgagcgtgataaagaggatgaggagccacgagagggcgatgacgagcgcacatgcccagcgaggcggggttttgcggaggaaaaggacgatgaaggtgtggaccgaaatcaggagcgagaagatggcacagcctggttgcagatgggcaagagtcagaacctagagcgaatggaccgccatcctcacttgactgaccgacgtcgccgaactcggtgatgcctgcttgcgcggtacaggccgggccgagccagagcgcgctgtgcttggcccagacgaggttgaggacgaacccgccgccctggcataagtcgctcagcagcatcgagactgaaagcggcgtccgacgcgtcagcaaaataacctgcgtggtccttaatcaggaacgaggggcttggacgaacccatgtaccaaccgagcgggtcgccgaggaactgactgacgccgcgcgagacggccggcgtcgaaatcgctcgccggagcggaaggatggcaaagtagaggaggagggtgccggtcgagacggccgagaccaggccagcggctccgacaaagctgggtggaaacaacctcgtcagtccctgggtggtcctgatcaacgaggagggcaggcgagctcacccgaggccgacgtcgccccggccggtgaaggtcgtgcggccgccgacagtgacagaggtcgtcatgatcgcgagtgttgcaatcgacagccggacgagcaccggatgcgacgaagagagggcagcctggacagaggaggcgggtgggtgcgggcgaacgtcgagcaaacaagcacggagagctggtcttgcgaggtgcgagctcggagaagttgccgacggtttgagagaggcttaagagtttcggccgtaaatcgagtctggtctgcggcttgagtctgaagagacgcctagggtgatgcggaagagcaacgtcgagggagacggagtggatgagcgagggaagaagcagacagtcccgaggagcgaggagcgagaaggctcttcgaccccaaccgccccctcgccccaccacgtttcggcgtctcagctcgtgagaagggtcagcccagacggcgcaaggaccgagcgaccgggcccatcgtgcccgatgtggccgtcgagaccgggagaaaagaaggttagggaggggccaggctcgagagggcgagacagtcgagggcaagggtaacacgccctgcgcgccgcgccttcgagagctcgagccagcggccgcttcagcccctctgacagccatcgtctccaacctcacaagccagctcgcagcccagctccagccagcagcagaggacaaggacgacgactcccggatgacatgagtcgcatcctcggcttcgggaccgacctccttcggacggcccgcatcggcgagctcgttcggcgccgcggcctggcccggctcgcgcgccgcatcctgacgaccgacgaacaacaggcgctcgacctcgttgtcggccagcctgcccaggaacgcttcctcgctgtccggtacgtgcgcaggccttgtcaccgcgtgcttcgaaagatcctgcccgggccgaagagtctgacgaccgagcgctgggtgcttgcagctgggccgccaaggaggcgctctacaaggcccttcagccgcactacactccgagctggaaggacctctcggtcctcgcctcggcctcgagtccgaaaccgcacgtcgtcttcagcccagacggtccgctcgccgacgctgggctgacggctcatctgagcatcagccacgacggcgactacctcgtcgccggcgtcgtcgtcgagcgcgactgagtccgcccaggcatgtcggctagcgaagccgacacactcgtaggtggcaggtgtgccagaaggagtagtgcaatggtatacaagcaagggggccgtgctgctatgctaggtgggctgttcatctaggatcggcaaagcggcgacgtttgagggtcagccggatctagggcgggcgttgacccgcacgcagcgcagcgcgcaggaagagcgagagacgcacacaagatgagacgggaggaacgatggccttggccctggcttccttcagagatcaagggcaagataagtgggcggtcacggcgatgcttgcgctggcggcgccgtcgtcgtcgtcgtcgaccgatcctcgtgggcgttgacgccgatgatcgagacggccggtaccgtctccttgcggttgttggtcgtcgagggattgccacggaagcgcttgcgcatgtcgagctgcagggcgggctggaggtcagcgatgcttatcgaatgtagagagactggcagctcgcagctcggggtgaaggagctaggctgcatctggcgcgactcaccattccccgcttgcacgtcgccagactcttgcgtaggaactggcactcctccggcagctcgtctgcgtgcttctggaggcactcctgcggtgtcagaccttgcttgaggacgcagtcggtccggagcaggcagttggcgaagtcctggcggatgccggcgcaagccttgttttcggacgacgacgcgaacgccgtcgggatgtaggacgacatcggctctggcaagtgacttgagcgagcgcttgacggtgctttcagcctggcaaatgagctgcagcgaacgagactggagcagggtcggagggtgtcgtggcggttgcaggctcagctgcgtcggtcgctctcctccgcttctccttccaccttcacctccctctcgacccgccatcttccagcctggccactctctggcagcgagacttggtcctccgagttcttcacagcagtacgaatcgacacctgtccgcctgcccgggaaggcgcccatcatggcaagcaagcctccgcagccggcagcgacggctcctaactccggctccggcctcaccgaccagcgagcatcagcctcgccgacaccacaagacgaggccgacgtcctctcgcagatgtttgcccggctcgacgccgaggcaccgaccgactttggcaggagctcgagcgcgacgggcgagggtgttggacgagccggcccgccagcggatgacgttgacgacggcgacggccacgacgacgggggctcagacgtcggcgaagtgtgggaggatgcggccgaggatctcgactgggatgccggagaccttgaaacagagacctggagcatcgcccgactccaggtgcgtcgtatcgtcgtgaccctgctccagtgcctctcggctgacgcgtcgtccgcgcacgcgccatcctcgcccaacgtcagtcatcgctagcccgggccgaagagctcaagctgaaggccaacgcagagttctcgcccggcaaagccttccaccaggcgctgacgacctacctctcggccctcgccgcgctcccgggccggccggccgtgccagatccaaaggggaagggccgtgtgctcggcccagaggacgaaggcgtccggatcgaggaggtcgacgacgccgaggcggagcggatcgagagcggcacgacggccgaggaggcgcagaggctggatctcgaggggcaatgcagtgcgatccgggcggtgctttgggccaatatggcggccgtctacctgaagctggtgcgttccatgagacgacgagcgacaaattgcatgctaacgagtcggtctgacgccgtcacctacacaggggcagaacaaagaggctgtcgagtcgtgtacggaaggtgagtctggccttgtttcgccggagcctccctctcatgcgacgaattgctgacctgcgtggcctcttgcctgcgccttccgctcagccctcaaggacgacccagaacaagtaaaggctttactccggcgctcgacagctaacacgacgatcagctcctggtcgtcgctgacatcggcagaggacggtgcgccctcgattacgtcgattgcgaccgctcgtccttgcgcctgttcactgacgacccgactctgcctcccttgcagattacaagaagctcctgagcctcctcccgccatcttcgccactccgtgcgcacgcgcagaaggagttacggagcctacccgaccgaatcaaggcccgggccgaggaggagaagggcgagatgcttggcaagctgaaggaccttggcaactcgcttctcggcaatttcggcctcagcactgacaagtgagtcgctcttttctcttaccagtcaaagcgtcgctgactagtctacgatttttgcctctcttgccagcttcaaattcgagcccaacggtcaaggaggctacggtatgagcttcgtgcgatgaagcatgcatcgtcgctcgtcgttgtgctcaagtaagagggggtcgtcatacaggggtgatgtggcaacaagcaaggcagtcagcgggcaggagaaagggcgcggtagaaaggcgcgtgacaacagatgcgtgaggaggaggctgaaggagtacaaagaggaccggaggtatgcgcaaaagaaggaagaagagtggaggtgagtaggagtagagccgaacgaccttcggctcacatgattgtgcagccccgaaggtcgtcgctccggccggcgaccgaccgtctgccgctgaccggcgtcgctggctggcttatggcccgtctgttggccggccgagcgggtgcgccgacgagggcaattgagccggagcttgcggtccgccagccgagtgtccgacgggcgacgctgaagagcgcgtcgccgtccttggcgcgcgtcggcgaggaggatgcgacggcggaagcggcggcgatggcagcagcgagagctgcagcggcatgggcggcttcgcgtgcgcgtgcctcgcgggcgacctccttccgcaccgagtcgacgacgctccaggcccagaagcaggagaggaccggcttggcagtgtcgagctcatcgcggccggccggtgacaccgcgctggttgtgctggccgaagcgtcgtttgttcggggaacgtgcgactggaagtcgaagggcgaaaaggcatggcccggcataccggcccttgggcgggtgagcgacaacaggggaacaatggccgagcgcgagatgagttgcctaaacagcaaatataaagcacaagcgacagagatcagcagccagaagtcccttagacgaagagcctgagaggcagacgtacgaatcgaggacgctgagcgcgctgccgttgacgccaagggctcggacgccttcgatgaacgccttgacctgagcgtcggtgatgcgcgtcccgtcggcttcgagtaccttcagctcgcggcagccgacaatcacgtgcccgatgccggccgcggtgacgcgccgacagccgcttaggacgatgagctcgacccggacgcaacttgccgccagaaggcgcaggacgtcatcgtcaaccgcatccgagtcctcgaggtcgaccttttcaagagtcggaaggctggacagcagacgggcgagagggggcgggttgatcggttcgcgcgcgagcaagtgagctgggagtcggctgaggccggcgagctggaggaaacgcagggcaggagtggcatgggcaagatgtacgacaccgacgtctgaaagcaaccggcaggctgagaggttgaaatgctgcagcgccggcaggacacgctgggcgtagctctcgccctgcttgactggctcgttccggccgccgcgggacacgatccaacgaacgaaaggcgagtcggtcgcgggcgcctcgtctcgcgggatggatactactgcagacagtgcgctgtcggtcacgtcagtcgcgctcaagtcgaggcttttgagccggccaccgcagtgcccgattgcctggaggatcgtggtgttcatccccttgagcccggcgacatgcagcttctcgagcgagccgttggaggccgggccgacgaggaggggcagaaggtcggccgccgtgagtgttgggcaatgcgagagcgagacgctggtgaggttagggcaagacgtggcaaggagaatgacgagcgtgcttgtgacggccggctggtgcgacaggtcgaccgtcgtcaggtgcgagctctagtcaggccagatggaggatcgacaatcagcctcgggaagacttgctcgacgacggaaagcctaccttagcgaccagctggccgagcggaccctcgccgacgcctctgcaggccctgagatcgagcgtccggagcccagtgctgtcgtgcctgccgaaccggtcgatgatgcacaacccgtcatcgtcctccgtcgactcgcgggccgccccggcatcgcctgcgagctcgaggccaatcttacgcagatcgacgctcgatagatcgatgtcgcgtaggacgagtgagcgcacaaacgtccctgcatgggcggcgacctggaggacgttggccgccttgagcgtgtcgtcagcgggcttgggtcgcgttgcgaacgggaagacgctcgtcgatagagccagccagagcgagccgtcataaacgagcgtcgtccatgctttgctaacctgaagacaggacgtcaggcgaacgagagacgttagcaggcatttgctcttcacggatgcattcgcgcagcaggtggcacgcaccctcgagagcttgatgagctcgcgccggccggctccttcgccgacccaacggtcacctcgcgcttgaccccgaggctcatctccaatccagagctcgatgagcgagcggaagacgagcagctgaatctcccgtggaaggacgtcgtcgaatgatggcggcgggggcggcggcggcaagggcagggatgagtggccgatgacggtagtcgagacaggcgtcgctggccgagtaagcgtcaggagcgatggcgatggcgaggatggtcgcgtagggacaggactccgctctggcgtgaagaggagcggtgtcgaaggagccgttccgacctgacgccggctgaacggcagcggcgagagagggaggccggcggccgacgaggcgtgggccgacgccgtcgagctctcgcgctccttgcccttggccgaccgacctccgatgcctagacctgcgagcgagaggaatgagttgcgccgcgagcgtgaagctggcgtgcctgccgtcggcgacgacgagggcgaagcgatccgggcgaggtcaggcgacggcaggtgagggaaggtgccgccgccgccgccgccgctgggccgggttgacgaccgctgcggcgtggctgggtcaaacgacgacgagccggtgcgcgaggacgagaccgaggaggagacaccgggcggggacgacatgttgatgtgtgagggcgagccgtcgtcggccatgacgggctagagatggatgagcgaggtagtggcttgcgaggaaggtgcaagtaagcgtctgggtccgctagccctgctgcgcctgacagccgggccagacaaggttgtcctcaacaagtgctcacctcaagaggctgtcattctcaaacaaccgcgaaggatgaactcagcctgacagtttgagagatgaccggggtccggaaagagacgactcatagcctggtcacccttcacaacagacttcaggaagcgtgaagtggtcgtcaaagaagcaaaaagcagtcagtctccccccccctctctctcctcaagcccagtccagcgccaggccacatgtcggatgctcaacgtcgtcacgcgacagcctcctgccaccactcacgaccgccggcgagccgcgagaccgcactcagcagcagcacatgcacggccagcagcatagggctgcaaagaggcctccggcgagcaggccgccggctacggctccgcccccgccatttgacggctggggctgctggacgtagattggctggcccgtgcctggctgaccggggtattctgcggcgcgcagaagggaagcgatggcgagaagcgaaggatggtcagcaacgggatcgcgttattaaaggacgagaatgtcgcatgtcgatagcttctcgtccccgagaggcccgaagggtcgtacgaggctggccgtagggctgctgctgcatgcccggtcctccgtagtaggtctgcggcggctgctggagccccggctggttgaattgcggttgctggctgccgcccgggtaagggtactggttctgctgcgacgggtaaccctgcggaggaccgtagtagctgagagcgagtgaggcgggggcgcatggtaaggacgagagggtgatcagaagaaagacgccgtcagcggtcggggacaggcagggaagggggctgcgcggacgatgcacgagttgttcttgtcgctcgtcatggagctctgattgaagattgcgtgtacaaaggatcgggctgggcgtgtgtatgcgagtgctgaaaggtaaggcaggtagggtggtggtcaggaaggaaggtggcgagcgagggaaaggctgcggccgtcacaagcagccgagcgagctcttggctcgacgccggaggccgcgcagcagcagttcggccggccgtggcgtcggtcgccgtgccgtgccggacccggccagtctgcggcgacttaaccttgcacagcaggccacccattctcccagcagtcgctcgctgtcacccagaagacgggcacagccgacagcctcaagacgtaagggcacatctagagtgtttaagcaggcgtctagcggaacaggctggcccagacggtccgaagctcctcgaggctgctgacggtcgcccacgactggccgtcggcgtcgggcttgacgacgtcgacccggccgtcgtcggcgtcccaatccgatttctccttgtagtggacggcgtgccacggcggcgagagctggaccgaggcacggatgttgaggagcgagtcgtcgacgaagtagtgtgcgctcggccggccgccggcatgctcgattgcctgtgaaggagggatgcgcgtcagccatcgcacaagccgaggccatggccgctcaggagcctgcgcgcgcacctcatcgtagaagccaagctcaggcttgcacgaaaagtctccgtcaggtcggccatagtcgcagtatgcgagcccctcaatgagatcctggacaccgagaattgaaagtacccgccgggcgtgagtcttgtaggcattcgtgagcgcaaagagccgaaccttggccgggtcgagcgcctggagcagcgcgcggagtgagggtgagggcgcgaggatcgactcgagcgggagtgaggcgtcgcacacgcggtcgtagtcgagtgcatctgtcgcaagagaagggcaagagcggaacatcagccggccaaggctcaacacgtgggaggctctcgagcccaagcctcggctgccgggacgcaccgatgtcgtgatgcttgacgagaccccggatggccaggccatactccctgtagtacttctgatggagttctcgtgccttgtcctcctcgagcccgagcgatttaaagtactcgcggatccgctcggccatcatgtcgtggatctgtttgagggtcgagccgtgatcagctcctctgcatgtcggctgagcgcaggctggtccctcgaggccaatttttattaaccttgtgcttcttgtcatatagggtgcttttattgagggcaggaggtcgagggtaggaggtcaggccgctgcttgaatcaagcactcgagtcatccgcaggcatgcccgcctgcgcgtcgccgcttcggaggctcggaagccaggcgtgaattctgagcggacgagagaaacgaacagacgaacttgtcgatatcgagccagacaatagcgcgcgtgtcctcgccctcgatcgtcggctggggcgtcgagagcgtgtccttgaggtctgacagaggtggaagggtaccggcggcgtgagtgacgtagcctcgggagccgacgacggctcctaggagctggcggttggcagatgaacaagctggggacggaccgatgaagcctgccatcagagtgagctggtcgaaggagaggagtgggagtgagcgaggatagagagtgggtggagtgtgctgcgatgggagtgagcgtcgtcggagtcggagggacgcggaggagccgccagcgcgcacgcatccgggccgacgaggcctccctgtggcaatgcatcgagctcatttcccgcgcgccagggcgacgcgcagacgcgttggacttggagcgaggcgaggcgagcgaagagccggccgacccccacttcattgtcgccctctctcccttgatcatgtccaagacgccctcgccatcaatgccgccgccgtactcgcgtcgcctaccgctcgacgagatcaccaacgttgtcgcaggcctgtcatcggcctcttattcctcctcagccctcgcacctccgacgtcgtcgccggcgccgccgccacctgccctcgtccggccacaggcgttcgacgagacgccctcgccgccaacatcgtcgatgccgcaaacgcctcgccggtcgtcgcgcattgcctcggccagcgtcgtgcgcgcgagcgacggtgcatcttccgctggcggaccgagccggccaggccttattctgacgccgacgaggctcgacgcccagcgacgcgtcaaggatgctggggccgacagcctcctgctctctgccagcaagcgctcggtcaagaagctccggctttcgtctggcgcgccttcgcccgccgctgctctctcgcgggccgcggagaagcgacggatgacggtcgatgatgcgagtgactcgtcggacaacgacgatgacggcggccgagcgatggacgttgatgacgacctcgcgacgcctcctcgccggctcgacttcctcaatacggccgacagcgacgaccggctcaagagcttccgtcttccgcttccgcctcttggaggccgcagggctggccggacgacgggcgtcctcggctacctcgacgcgcgcgcttcgggaggcggctcgcgacccggtcgacgacgcatgctcggcggcggtgggctcaactcgacctgtgcgtccttccgtcctcttgcaacttctttcaatgccttcctgaatcgttctgctacctgacagtgtcgacgctcgaccaccgagcctcgtccttcgtctcgtcgcacacggaggatgtttaccgcctacggtcgacctaccccgaccgcgacttcaccccgctcttctccgtcgccttctccaacggtgccaagcaggtcggcggccggcagattgccgccgtcagctcagaggagggcgtcgtcgactttctcgacgtcgagaagggcgcgagctgggatcgcgagaacgaccgccggcgctggcagccgcaccagaacgctatctttgacgtctgctggtcagccgacgactcccagatcgtgcgtcgctttgcttgcaaagcgtgccaatcgaccggtcgctgacccctttcaaaaatgcagatcacttcgagcggcgaccaggcggcgatcgtgaccgacgttgaaaagggctcgacggtcgcgaccctcatcggccaccggtcgagcgtcaagatctccatctgcgacccgagctcgccttgtgcgtcttcgtccagggcctgaagcgctaaagtccgagcttcgctgacgaccgtctccgactcgcagccgtcatcacgaccgcctcgcgcgacggcaacatccatgtctacgatctccgtgcaaacgtttccggctcgtcggtcgacgcacctcgacgcaaacggtcgacggtcgcaatgacagggacgagtgagcaccatgcggacattgctggcctgctgcccgtcaacgtcatccagcacgcccatgccgagaagggtggcaagaagcccaatccgcacgcagttcgtctgcgcattttcatttgccgtcttgcccaaccgtggcgctgacacccagcctcctatgcgtcctgttcacagcggaccgcgactcgctcgccaacgtccatcctctacttgccgcaacggccgcacatgcttgcctcggcgggtaccgccgacgggacgatcaagctttgggacctccgcacgcacggctcgtacaccaagactggcccgcgggcggtcgttccgccgctggcggccgacgagagccgcgacccgtcctggggaaagtcgtcgagcgtctttggccagcaggcgcagggaatcggaagggcgcacggcgttgcgagcatggtgctcggtcaggacggcgacgtcatctatgctctcggcacggacaaccggtgcggccgcccctgccagtgcagatttctctctctatctcgactgacggtgtttccttccccctcgtaggatccacacccactcgccgctcaacctcgcccagcctctgccgttcacatactctgccgcagcgctccagacgaccttctactcacgcctcgccctctcgccctgcgggtcctacctcgcctccggctctggccggggagacgtccatctctgggaggtcggagggagcctcggcgcgtgcccgacagagggcgccgagcgcgaaggcatccggctcgactttcagagcgtgtcggccgccgtccaggccggaaggaagcggatggaggtcggcagcgtcagctggtcggcgagcggagtacgtcattcgcacagcagcagctcccttgctttctttcgtctttgctgacggctcctgtcgacccctttgtgcccttcccagctcgcgtcgtgctcggacgacctctcggtccgcgtctggaaacccaacccggaagccgcgcgctatctccgcgacgaccagaccggcgctggctggtcctgggccggaagggcgtacgactgaggagtagatggatcgaatgcccgcctgctctgcttcccttccttgtgcactacttgaggttcacgccgtcgagcgtcgccgctgttggccgtcgatttcgccgcgtcgttcggtctcgcgcggtcgcttgtatggtcggtcggcgatggccgctgccaacgttcgccagcgcatgggcgcgctcggaagcatgcttcgtgccttcgcccgccggccgaagcgagctgccctctactccccttttgctttgccagctgcgagagagagagactgctcggcctgcctggaaggaagctgccagcaaggcaaggcggtgcatcgtctgaccctttctgtcaccctgcgcgaacgtcatgccggactcgcggcgtctgctggcaaaagagatcggaggtatttcgggctgctgcgcgcgccaagaggccgcctggaaacaggcagggcgggcgccgatgctaaaggatggtcggaggctcgctcgccttcttgctctcccgaccaccatctcgcctctctttcacgccacagacagcaccaaccccgacacccacacaacttacccagacaaaccgacgcaacaaccgatggctaccgcttcctccgatcccggcctccatcatacgacctcgtcccacccgggtcccctcgccaccgccgaacaggccgctgccgccgaggacgtcgagccgcctataggtctcgctggttcgtccagcagcatcaaggccttcgatgaagaaggcaaccaccaccaccagcaccatcaaccaggagaggcccacacggacgtgggcgtggataagtcgtctcgaggattcctgatcgataaggtgcgtctccgtcgcccgacgtcggtggagctttccctcgccaccgcagcctaagacctttcgaaagctgacccgttcgaccggctctccctcagctcctctccggacacctaactaccaaggagcgcctctcttcggcctcctcccctgaggtcggcaagggttagtcctatcctttctttatcatcgctcaccggctctcggccggagctaggccgaggcttggcaaggtcgtcgcagctgaccgacgctcgactcgcatggcacccccttcccatcccatttccccttccgcagccggcgtcgacacggccgtcgtcgaagcctcgcctcggcactctctcaacctctcgccgccggtccggccgatgaagcgcatgccgacggcccccaacccgtcggccttccacccggcccccggcaccgtcctctcgggcacgagcacgaccgcgcccttcttcatgcacgacgtcgagaagcgggctgacggcggcaacggcgcgcagacgccgagccgccggccgatcgtcgagacgctcatgaagccgagcaagaagctcgctagcgatgccgacctgttcgtcccccttgctggtccccgggccacctcgtccttctcatgtcgctgactcttccctgccgttatctgcagcacctggaagcgcgccggttataacgtgatgaccgcctcttggttcaacgtcctgctcatcttcatccccgtcgcttgggcgatggagttctcgcaccagtccgacacagtcatctttgtcttttcgatgctcgccatcatcccgctcgcgtcgatgctcggctttgcgaccgagcagctcgccctccgcgtcggtgactcgctcggcggcctcctcaacgcgacgtttggaaacgccgtcgagctcctcatctcgatcctcgcgctcgtcaagggcgaactcgacattgtccaggcctcgatgattggctcgatcctctcgaacacgctcatcgtccttggcatgtgtacgtccgccttctccgtttctgcgtatctcacctgctgccgctgaccgtcctctgccttcaccggccctcaggcttcttcgccggtggcctccgctttcacgagcagggctacgcgatgcgcgccgcccagctcaacatttcgctgctcggcgtcgtcgtcgtcgcgatcggcatccctgccgccttccacctccagaatggccgggcctggactgagccgcccgagggcatcgagctcgagcagatcctcatgatctcgcgcggactcgccatcatgctcctcttcctctacctcgtctaccttgtcttgtcagtctgcccttccctcttttccttatcaactctagcgctgactccctcatccccaatcgccgccctacagccagctgtacacgcacgcgtacctctacaagacggtgacgccgttccagcgtcgccggctcgaggccgccatgccccacgccggaccgtcaccgccgtcgtcgcatgtcttccgccggccgacctgggtgccctcgcattttggctcgagctcgtcaggctcgacctcgtccggcgtttcggtccgctcgcgccgtcattcggacgtagacaccgagggtggaccgctcagcatcggcggccctaacccgcaggacagcaacgtgcccgacgtcgagcttgaccgccgtgagaaggacagcgagacggacgaggacgaggaggagtttgagatcccccagctcaccgcgattcaggtacgtcttttcccccgacactttggatcctcgctcgtgcggtcgctgaccatcctttcaatccttttacaggccttcctcattctctttatcgtcgttgtcatcaccggtgtcacggccgagttcctcattggctcgatcgacggcttgacgaccgacggcggcatctcgcgcgagtttgtcgccctcatccttctgcctctggtcggaaatgcggccgagcatgtcacggccgtcaccgtctcggtcaaggacaagatcgacctctcactcacgattgccattggctcgtcgatccagattgccctctttgtcatcccgctgcttgtcacgatcgcctggatgattggccagccgctgtcgctcttctttcccgtctgggagacgatcatgctcgtccttaccgttctccttgtcaactggacctgcggcgacggcgtctccaactttgccgagggtcagtccaaactcattgctcttttcactgcgtctcgaggctgactctcctactcccactttgcatcaggaatgatcctcatggtcgcctacctggccatcgctctcgcgacatggttcgtcgtctaagcgccgatcaaacctcgaccctttaaccggcgtcctgtggcccaacccacgtcgaccgtgtccttctctcaccttcctccatccacactgtagctatgcacgacccaactcgtcttcctcctctctctttctctctctctccctctcttgggcttcttttccggtcgtcacacacgtgcgaccggctgtcttaatgacgactgctctcagttgctcaggctcttcgcccccgccaatgctcgctttccatgttgctaacctcatccctttacaagctttttttgcggccgtctctactcgacggtcgagacctcccagtcggtgactgcaggaaggtggggacaatccgcgtgtcaggcgaaggatcttgagtgaatctaccatcacggacgcaccgaggaactcgtcgagcgcgtcaaactccttgacctcggcctcggtgagctcaaagccaaagacgtcggtgttctgcttaatccggttctggctgaccgatttggggatgcagacaaagcccttttgaagcgaccagcggatgagggcctgagcgggcgagacgttgtgggcctcggcgaccttgacgacgaccgggtgcttgaagcggagcgcacggacgagcggcgcccaagcctgcggggaggatagagtcgagggtcagaggcgcagaggagcgcaagctagagtcgagtagcgcgcacctccatgtggatgccgtgcttgcgacaggtgctgacgacgtcctcccgagtcatgaacgggtggaggtcgatctgtgagcgagcgacacgtcagtcggtgcaactcctgcccgctttcaatcagccaagggccgaccgacctggttgatcgacggtagggaaatgatgtcggactttgacgagtcagcgacgcgctcgacgtgctcctcaatgtgcttgacgccccctgtggaaggtacatggatgcagtcgtcagtcgtgccgtcgagtcaggggtggacacctgatgcgaggaccgacagtttgagacgccgatgctccggacgagtttctccttcttggcccattcgaacgcccgccagctctcctcgcggagcttgggcccgccgatggccgaatgcatcaagtagagatcgacatagccgccgggagcgtgctcgcacgagtacttgatgcactcgacagccttgtcatacgtcgtcggctcgcggagcttggtcgtgtagaagatgtctgaccgggggacgccgctcttctcgcagaagccctcgatcgccttcttgcaggcgtcctcgttctcgtaccctgcaaggcaaggatggacgaatcagctgcggaggcgacgagctcgcaggcggtagccagctcatcgaccgcacaggtggccgagtcgacgtgccggacgccggcctcgagagcccaagtcacgctctggaccgtctctttgtcgtccatctcgtagactgaaagttaagggctccagggtcagtcgacgctttcaggagcgacccttgccttggcacctcgcacctccaagcccgagctgggggatcttgacgccgtcattgagctgcgcacagggaggccgagcgggtcagcctgcctgccttcggcggagcaaagcagggaggctctcaccgtgatcgtcgaggtgagcgaggtggccgtcattttgagcgaaggaagagaaggaagagaagatgaccgtcggagggagcgcagcggcggccccgttccgacaggccggcccgcggcagtaacggcggagacgccagcacccatggaacccgcagaaagatggtggggcacatgaaatcattttcgtgcagacagcgatttggtacatggcagcagcagaggatgttggtacaaagcaggaagcacaagggcacgattgtcgcgggctcgctcagacgtcgtccttacccgtttccgagcctttgcgtctgtcaagcgtctccaggccgagcgttgcactccggccgatgggtcggctactcgctggcgctcggcgcgacgtctcgaccgacagactcgtccggcgcgagttgccgccgctggccgtgcccagctctcgccgggcgtcggccgaggatctaacgctgttgaagacgtcctcgtcttccggcacgtgtgacgtcgagagcgcgcttgacgaggagacgcgtcgcatcggaaccgaggaggccaagctcccggatcgaccccaggccgaatcgaccgtccagtcctgcggtggcgtgaagccagcagatcgcgacgtctggaggatcgccgaggtcgagtgggtcgtgtgtgggagtactggcctcggagagaggatgccctcggtcgagtcctggcgcatgcgaaagtacttgcgcggtaggaagcggtgcaggaaggaggccaggtgcgattcctgcgggggtggaaagacggccgtcgtcggcgtggccgagggcgacgagggcttgccaggcgtcgagcctgcgatcgcaagcgtcagtttaaaatggatgctcacgcttttcgcgcgtgacttactgagagagagaaagatgtagaagggcacgagccagacgcagattgcgtagaagacgaggcggtcgaggctgtcgccacggtgctcctgcgcgcgctcgacgcgggccgatcggccgtacgtcggccggttccggacgtcttgggcgtgctgctggagaaagtagaagtaccacgagaggtgggtgatcggcaggaggaggatgccaaggatgagagccgtgctcggagccgagagcgagggtgtcggagacgacgtgacgactcgctgttgattgcaggtcgagcgagcagtcagaagctgatacgaccgaacacgctgcggagaccactagtcacgcacgaggtagacgaggagcgcacaggccgtcaagagcgtctgtttggccggatacgagtcgaccaggtacaagagcgcgaggacgcaggcgacaaactggagcaggcgtgaagacaagcagtcagccgcgatgcaagcttgcagacagaacgcggccagaaacgaggacggacgtagatcaggctgcggccccagcgtttcgcatcgggccgattgtgctcgagcacgtcggcgagccagagcaggctggcgcctgcgatgggggaaagcagggcgaccgtcgtcagcgtcagcttctgataggcagcgcacaccaagcaaatcgagcgagcgcgacctaccaaacgtgaagaggaagaaaaggccggcgccgacgacgctgacgaccgccaggccgtgcaggaaggttggcatggcgcgatgatgggctgaacggaggggacgcgccggccgcggcgggagaggcggctcgtcgttgcccagctcgcgcgcgagcgggaagagtcgaagcggtgtttcaggcaggcctctgctcttctatgcggccatgcagctgaatgatgcgagctgtgtgagatgaggaggatggaggggtgggatccaagggcgggcgtggctggtcgtcgtcgtcgtcggtcggcacggctcacggcggcggtgtcgcggcacgtcgcggcttgtcgggcgatcgagaaagagctggggggcggtcgatgcggccgagggaggttcgatgtcgagtagcagagggtcctctctcgagcgtgcagaaagtcgggggcagagcgcattagagagacaaggcagatcagaaggtaaggttcaaaagcagaggtgcgtgtgtttgttacgtgaattcggaaggcatagcgaggacatatcggagaaggaggctgcgagagacggatacagtagtgggttgcgaaagaaagagagcgcgcgtacgagcgagagagagagagacgtgaggaggtcgctagcttccggtggcgcagggggtagagtaatgataacggagaatggcagcctgtgagcggccggggaacgtcagcagatgacgcagtccttgctctccttcttgcggtggtgggcggccggccgtgggtcgacgctgcgggtgctgtggcgcgagaggccgtcgtgttggctaccggcgagatcgaaagccggctggtaggtcgtcgggctcgggagaggggtctcaaagacgactccaccctcgtgatgaccgccgccagctggctggagcgaggtcggccctggactggcgccgtgaactgtgggcgtgacggactggaccggcggctcgacctcgttcggttcgctgtcgtcgctgaggcccgaccggccgatgcgcgagagccgcgattggcggctgaccggccggtagtggctcgattggcgcgagatgggccggtcgtgcttgctcgtctgccgctcgcgctcctcgctcgtccgcgagttggggaagacgaagcgcttgatgccgctcgactcgccgccgccgtcgccgctgcgtcggacggacggcgtcggcgatcgcgagcgcttcaggttctggaagaagcgctccgaaatgttgagcgtcagaggtgaggtcgataggaccgacgaggacggcgcggcaggcgcaaaggtcgggtcgtcggaggggaaagggaacgccgtcgcagccgagtagaggtgctgctggctctgcgagtgtcgctgggctgcgacggtgtccagcaggcgacggtcagcctccgaggcagaatcttccgcgcggcaagctcgcagacgcacctgtgagcataagctgagcgccgaggtcgcacgtctcgggcgcgtgcttgacgcaagacgcgtggcagatgagcgtgcagccctcgcacaggacggcgcttcgcttgacgtgggcgtggcaaacgcggcagagcacggctgaaggcggaagtcaggtgcaagactgtcagctcagaagtagaccagctgcaggttgacgagacgcacgcttgctaaaggtgctcttgacaaatgtgtgcgcgcgtgggatcaggtcgtcggtcgacatgaggaagggcggcgtcgacattgacgacgggagcgacattgcttgagtgaaagcggacggctgctgctgctcatgctcgcggccggggatgtcaatgccgatcgggacgacgagcatctcgctgtcgtcgtccgcaccgcgctcgctcgttccggcgctccgatggccagggccggcagagagcgaccgcttgagctcgcggcgaagctcgatctcggtgctcctccgccgcaggaagggcacgctctccttgcgctgcagctgcggcaatcgcgaggctcgtcaggccaggaagagggagcgccgagggacggcgactcacctgatgcagatgagcgtcggcgaggacgctctcgagccacgcgtgctccgaaagaacttcagcggtcggccgcatgctcgggtccttctcgaagcactgcgacaggaaggcccggagcgcctcggacgcgccctcggggacaggcggcgggccgccttcgacaatacggtacatgactgagcacagcgggaggacaagagaatcagcagcttggcctgtgcttgccttgccgagcgagagcagactcaccagccatgccgttggcgcactcggcaaacggcggccggccggtcatcagctcgatgatgacgcagccgagtgaccagatgtcggacgccgtcgaggcgccctccatctggatgacctccggggccactgatcgggcgagaaaatgatgtcagtagagcgctggacgatcggatgtctaaatcgatggacgcactccagtttggcgtgccagcgacgtcgttctccttcttctgctcgaccgccacaagactgagcgagacgccaaagtccgagagcttgacgttgccgaccttggttgtgaggatattggccgccttgagatcgcagtgaacaacctgcgagcaggaagcggtgcagcggtcagcgccgcaagctcgggtcggacagcgagcgcgaccgactcaccttctgcgagtgcaggtactcgaggccttcgagaatcttggtgacgtagctcgcgacaagccgctcgttgagccggccaaaggccttgagcgttgagccgagcgagccgttctcgacgtatctgaagtcggcagagaagggcgtgagcaaaggcaatcgagcgagaccgcgcaaaggtacgcactcgagcacgatgtcgagcgtgttctcgtcccgcgacatgccctcatacttgacgatacccgggtgcgagagccgcttgacgagctccacctccttcatcagctgggcgatatcctcctcgcctaggccctcgagccggatgcgcttgatggcgaccatctcgccggtcccgacgttgagggcgcggtactaagagcgggcacgagtatcagcacggaagggctgatgccttgcgctcgaacgacgcgactcacgacggagccgaattgacctcggccgatgcagttgccgagagcctgcaatcaaggcggcccgattgtcagtatcgcagaccaagccacgaacaggcgtcagagacgcacgtagcggctggtcggcttgccctcctcggcgacggtcaagatctcgcggtgcgcgctccccttggcaagactcgtcgagcttgcgtcgcgcgagagcgccgcgctccgcccgcgcgtgtgctcgagcacgctgtccgagctcgtgtggctaaagcttggccggctgctgagtgccgagtgacggcggcggcgctcgtgctcgtcgccttcgcccgcgacgccgacggcaaactgggccgagcgcgaggccgacggtttggcgtacgcatcgtgcgcaatcggagtcggccggctggagaactcgggccgccggaactgatgatcggcttgcgggggcgacgtcgggcgaggggcggtgatggccgacggcaagggcgtgctaggtgccgagtcgagcgcgctgccctcgagctgcgccgaggtcagcggtgctggcgactgtgcgcgcttgatgctgcgagcgcggacgatgaagctcttgccgcttgctccctgcgacgagttgcgtcggagaggccggggccggttctcgacattgatgagctcgccaagctccgagtcggccgaagcggaggccgtgatgccgtcgccggccgttggagtcatctccgcggccatagcctcggcgacgaggctggccatcgtcatgcccgaagcggccatgtcgacgctcatcccccgccgggcgacctgacggcggggtgagccagttgcggggctcgagtcggcagaggagccggcgcgacgcaaggatgccgacggccggaggttcgtcgagggcgagacgcggcgtacgccggccgagcggatgcctggtggcgagtgtggtgtcgtgatgtcagagccagagaccggccgcaagattgacggcagagaagggagcgggctgttgacatgtgcgagggcagacggatgaccgcggccgaggctcgaggcgtccgaccgagaggagccctggagctcttcctccgaaaggattgtcttgagcgtcttggccgcctgagcagaggtcgacaagacgcagtggccatgacacgagtccgaactagaggagccgaccgagccagtcgcgactatcgggatcgagccgataccgctgtcgccggcggtcgcgaccgacgatgcgaaagagcagttgctctcggtcgacaccgtgcgctcggtcccgacgagcgacggcgtccgagggcgcgcgaacgcagcgagcggcgacgaccggggcgtcacctgcatgtagtcgtcgagcgcgacggggtcctcgattggcggcgtcagcgggcccgacgctgtgaaatggctcggtcgccggccggtcggcgaagcgctccgctcgccgctggagtgttttcggccgctactgctgctgctgctgctgctcggcaccgagtcgcgtcggaggggcgagggcggcgtgacgcgtcggagcgactgatacggcgggatgaggcgcgggacctcggcggcgctgccgtctgtcggaagcgagcgcctcttccgactcgcgtctgacggcaagacaaagacgaccttgctcggcgaggcgggccgtgatgcgggcgagccgggccgggaggccgtcgggctcgacgaccccgacgacggcgccttcttgaggctcgagctgccggcgatcgtgtcaaaatccatcttggcgaggacgttgagcgtgttggcgacgcggtggaagccgtcgggcgtcggagccgagcacacgaggtcggccggctcaaactgctgctcgagcgtgaagccgagcgagccgagcgcgtggagaaattggacggcgttgcgcgtggccgatgccgtgtcgggccgcagcgagggcgtcaaaggcggctgaagagtcgtcgagaagagccgattgagaaggctgaggggcgagcgagtcaccaacccgcgaccggatcgagtcaaggaaagcggcagactcacaagcagaggacaaccccgtcggcgagcgcttcagcgaacgcccgctgctccttgccttcaccgccgaccatggtcgagcccgcccacgcccgctcggcccgcctcaaaggcccaagccgctcctcgccctcgacccagcccatctctggtcggctcttgacctcgcgcgggaggtagcgcgccatttctttgaggacaaaggatgctgctgagcgaagagctagccgaccaagctggacaggtgatgagtgcgcgcgcttgtgcgtctgtcgcgtcggcgtcggcggcgaggagtcaaagacatcggacggcgagtcgcccgtcgtctggctgatggtcggcgactcgggcgccgtcggatgccggacgcgacctacgctgctgccagccgcgctgctctcgagcggtccgaggagaatcggcgactggaggccaacccctgctcccgtgggcgtcgccggcgtcgccggccgcttccggggcgtgttggtcggcgtcggcgaggccggcacggccctgagcgtgttgacggtgctcgtccgcgagcgcgggggagagacgagcgcctcaaccgaggacgacgacgagatgacgggatggtcgacgagcgcgagcgcgtccgacgcgaggtggagcgcaggcgaggagagcgtgccgacgcgcaggttgggcgtcttgaagcggttgctgttggggtcgagcagcgcagcagatgacggaccggccgcagggtcggcaagggttgacgtcgcatgcgagatcgtgccgggcgcggtcgtgctcttgggcgggcgttgccgggtgagatcggttgaggacgtcgaggacgaggacgagaacggccgacggaggagcgacgtcttgcgcttcctcgccggaggctcctctatcgtcgtcgtcggccggacgagcgtcgggctcagcggctcgcccttgcccctggcaggcagaccctcggccgtgccggaccgcgctcgacgtcgcgccgtagcagtgccctcagcagcagcgttcgagtcggtcgtgcctttgaagaagctccggaggttccttgacgtttggctgagcgtttcgcctgcgctcgcggtgattgagccagagcggaagagcgtgccgcctcggctcgacgaggcgccagggccgatgcggccggtgctggagccgaaggagcgcttggtggtgcctgcggtcagggtcggttcggctgacctcgtcggtggtggggcgggcttccgagcttgagttgaaggcatgctggtcgagtgaaaaggttgcgaagagggaggtagacggtggcggtcggcgagagaagctcaggctcgctcaacgcgccttatgaccgaggggctgctctggaagagagccgaactcagcaggtcagcggcgtccggtcaacggagagcggcaggagctcgcggaagtggcgcctgggcgacggtcgcgggagggactcacggatcgtctgctcgaggctgctcgtcgttcactgcgaagtgccccggccggcaagtcaaaacttacggaatgcggacgagctagccgtccaagagcgacagggaggcttttgaggccgaggaagcggctcgagctggggctagcggcagacgcgacgtgctcggatgctggcttgtcggttgtcgtcgtcgaggagggcggcttcgagggttgagagctcgagagagcttgtgaggcgccgctgatgttgcgtgtcgaggcggagagctctgggcgatgacgacctggtcgacgaaagtgggtcaaggctcagcaagtcagcggcgggaagccgcagccgcgaaggggggggggggagtgacgacgagagagaggggggtcgtcgcgcaggcaggcgagagggctggccgtcggctggagatcgggcggcagcgattgggacccccctctccgaagctcggcagagcccggcggtagacgggaggaagggaaggcttacgagaggaggcgttggcgcggtcgagttgacgcgtctgctcggaggagaggtcgagatggcctgacgagtcgagctgcaggaaggggacggcgagattgtcgcgacgagctcgcccggcgagcttcgggcgtgtgtgaaggaggccgtgaaagggtcggggccggcgagcgtgtccaagggccaacgactgcgtgggccggatgggcgaggtgaaagggagagagagagagctgcgcgcggcccacgacgagaggacgaagccttcagtggcgggctcgagaggaggaaggagagcaggctgcgagagctgctggtcgacgctcgaccgcgcgacaccgaaagacaaggcgagagaggggcggggtggcgccccggccgcgagtgaaaggaggcttgaccgctgagcgtgggctgggctgaaacgctgttgcggcccgggaaggaggaggcgggtcgtcacaacaggcacgagcgcgattcgcgtccatctttggaataagcgggttttcgtgagcgaaaggcagcggcgcgtcggaagacaacgacgagcctgtcccaaatcgagcgaggatagaggcggaggagctgctgctgggcaagtaagcacgagcgagagatgttgcgactgtcaggagacggagagtggctcggtacttgattctctacttggaactcacctcgccccccctgcggctcttagacgaaatggccggccggcctcgccaggctcgcgcgcggcggtggccccgcgcaagagggcctgccagcgcgcgcgggctgccctgcctgctctccgaccctccttccttcctcacccagctcgaccactcttggatcaggtccgtcctttgtatgcttcgtagacgagagcgccgttttgttgtctagagagccgcagcagctgacactttggcctgccgcacccgaccttccctccgctgtcgtccgtctcgcgcgcaaaatcccgtccccaagcccgccctcacgccacgccgcctccccttcggatcccgtccctcctcccgccgcctcggacccggaacttcgcctcttagagctcgcagtgagtccgccaacgggtcctgggctcgaagcgcggagctcgcaggcaatttactcagcagctgacgctcacttgctcgcctcgcagctcgaccttccctcgctcgacctggccgttctgctcgatagcttcgacctccgcgagctgccttcgaccctaccggctcgacctctctcccctctccccccaaagcggccttcctgcctctccgcaccaacatgagctggacgcccaatcaggacggcgtcaatgagctcatctcggtcctccgcgactcgacgagcgaggacagcgccgtccaggcgcaggtcacaaaggtccgcctcctctgcgcccttccgccctagcagctaccacgagcgttggccctgacatccgttctcgcacctttcagcgcctcgagtccttcgagtcgattccagactacccgggctaccttgtccacattctgacgcacctgacgaacgaagacgagcgcttccggtcggtcgctggccttctgctcaagaacaacctcggcgccctctcgacggccaacagcccggcgatggtcgcctacgtcaaggacagcgtgctctcggcactcggcgacccggtcgcgatggtccggcagacggtcgggactgtcatcgtcagcttgctcaacgaccagggcgtcgagagctggaccgaggcgctcgccaagctcatgggtgcgctcgacagtcccaacagcgaggagcaggaggtcagtcttcttctttgccttggcgtgcataccgcggcagctcgctgaccgcttatcctgcaatgtcgtctggcgcagggagccttctcaacgctcacgaaggtgtgcgaggacctgccgaaggagctcgacattgagatttcgggccagcggctgctcgactttatgatcccgcgcttcatccagtttacggaccacccgtcggccaagtttcggacgcaggccatctcgtgcctcaactcgttcatcatcacccagccgccgtcgctcaacacgtccatcgacgccttctttaccgccctcttccgccgagcgtcggacgaaaactcggacgtacgcaaggccgtctgccaggcgctgacgctcctgctctcgacccggcccgacaagattgtgcccgagctgccaaacgtcgcagagtttatgatctacagtatgcaagacaaggacgagagtgtcgcgctcgaggcgtgcgagttctggctcggtttcgccgaggccgacgagctcaaggaccacctcaagccgttcctcggcaaggtcgcgccggtcctgctcaacggcatggtctactctgaggccgacctcatctggctcgacggcgacgacgacgatgacgcggccgtccccgaccggcctgaggacatcaagcccaagttctacggcggcaagggccacggctttgagcacgactcggccgacccgtcgtcgtctggcggcaagtcgcgcgcgctcggcgaagacggcgaggaagaggacgacgacgatgactatgacgacgactcggacgacgacgaagacgacttctcgtccgaatggaacctccggaaatgctcggcggcggcgctcgacgtcatgagcgtcgtctttgacgtcgacctgctcgagattctcctcccgcacctcaaggataagctctttagccaagagtggaccgagcgcgagtgcggcattcttgccctcggagcgatggccgagggctgcctcgacggcatcacgccgcatctgccgacgctcgtcccgctcctactgagcacgctcgccgaccccaaggtgcgtctcgtttaggttgggcgggccgagcgcgcttgatactgacccgaacatccacctccgttagcccctcgtccgggccatcacctgctggacgcttggccgctactcgagctggtgtgtcaatgcgagcacgacagccgaggcccaggctcagtttttcctgccgacgatggagggcctcctcaaggccgtgctcgacaataacaagcgcgtccaggaggccggctgctcggcctttgcgacgctcgaggaggaggccggcgcccggctccagccgttcctcgacccgatcatccgcaacctcgtctttgcctttagcaagtaccagcagaagaacctgctcatcctctatgacgcaatcggcacgctggccgactcggtcggcgagggcctcaacgaccccaacctcgtcggcctcctgatgccgccgatgattgagaagtggaacgccctcggcgacgacgacgaggccatcatcccgctgctcgaggtgagtcgccgaatggtctgctgtgaattgacacccgcgcgcgagctgactcgatgcccgcgctttcccagtgcctctcgtccgtctcgatctcggccgcggaggcctttgcgccctacgcgatcccaatctacgagcgctcgctcaagctcgtccagaagtcgctggccgagtacatcgccttccgctcgggccaggctgaggagcccgacaagacgttcctcatcgtctcgcttgacctcctctcgggcctgacgcagggcctcaaggagaacctctcgaccctaatggcgccggccgggacgccgccaggccagcttccggtctcgatccagctcctccagagctgtctcgacgtgagtctgcccgcgaacaggctccttttccgtggatcgaccccctgacagccggttccgtcttttctccagcaccccgatgcaccggtccggcagtcggcctacgccatgctcggcgacatggccatcaactgccgctcgctcaacgactatctgccgctttacctcccgcgcatctccaaggagatctctgaccaggtcgcccagcccaagtttgaggaggtcagcgtctgcaacaacgctgcgtgggcgctcggcgagattgcgatgcagtgtcaggccaagcccggtgcgttcctcactggctcatgtctctttcttgctggcggtcgactaacgagtcttgcgcccatgccctgcagacaacccgacaccggcgcttcgcggccagctcgagccacacgtgccgctaattgttgagtgcctgatccggatcctgctcaacacgtcgacgccgaaatcgctcctcgagaacgcggccgtgacgatcggccggctcgggctcatcttcccggagctcgtcgccgtccacctcggccagtttggaaagacgtggtgctcggtcctgtgggacatcaaggacaacgacgagaaggcctcggcgttcatgggcttctgccagctcgtcatggtcaacccaaacgcgatcctcggcgacctcatttacctctgcaacgccatctgcaagtggacgacgccgtcgcaggagctcaacgcgacctttgccaaggtgcggcctgagccttgtccgcatttgatacctccccggagctgaccctgacctcgcttcctctcgccgtgtgcaggtcctcacgtcgttcaagtcgatgctcggcgagacgtgggatcagaactttccgaccttcccgccggccctccaggagcggctgcgccagcgctacaacctgtagttcctgcgtcttcctcgcaccgccccggcccactccttctcatcacctcctaccacggactcgtccatcctgctgtccgcccaccttgctccctcaacttctcttgtgtctctcttcacgctccaatgcacgcccctcccgtcttgcttcactctcttctcactcgagcctccgggggtcgcaaaaccgcttccttcgactctctctccctttagcattagtctcctctcgcccacgcttgctccgccgctctgtccctgcacgcacaacttctcgatcccccgtagcatcccatcccccctgtcccttatacacatctgacgctgccgacgatcttaccgattgcctgtccgagtcaagactggtcggaggggaattggcagagcgagcagaagggcgagcaagactcctgcgagagcggctgtttgctgtttgggccgaggctggatgagcgatataggcaagatcggtcgtcgtcgtcgtcggaagaggcggaggggctacgaaagtggagcctgcccgtcgagacaagagggtagtccggcagacaggtcagcagccctcttgctctgaccctcgctcaacagatatccaaacactagactctaggtgagtgggggacgcagtccatgccagttctcgtcctagtacgacaaggggagacgagggctgacggacccacctgcctcttgccgcaccatcgcgcgtctgctgcctgcgcatccgctgccgaaactcgacctcgcagcaggccgcccctcgtccttgcccttgagctccccccatcatcaacacctctctctgtctcgtcatgtctacgcccaccgcattcccgctcgcctgcggtgtccagtcgtacgagtggggcaagattggctcggcctccaaggcggcccagtttggcccccccggcttcgagattgatgagcagaagccctacgccgaggtaggcccgccttgctgcctgtcctgccagcgcccttggaagggtcaagctgacgtccgctgcctgctccgtctgctggacaaaagctctggatgggaacgcacccgtcgtgtccctcgcgcaacctggacaccgacgaggacctccagaagctcgtcgcgtccgacccgaagcggctgctcgggcccaaggtcgtcgccaagttcggcgacgacctgcctttcctcttcaaggtgctcgcgatcggcaaggcgctcagcatccaggcccacccagacaagacactcgcccagaagctgcacaaggagcggcccgacgtctacaagggtgcgcacctctccttgagcatcgactgccggtgacgcgtgcacgtgcgggacgaccatccggctgatctcgacctctcaacctgcctcgcgctcagatggcaaccataaggtgcatctcgaacccagagtttccgagtgatgcctagcgctgaccgtcttaccgtacagcctgagatggcgcttgcgatcacgtcgttccgcggcttctgcggcttccggccgctgcccgagatcgccgcattcctcaagaaggtgcccgaattcggcgcgctcatctctgaccgggccatgacgacgctcctcgcgctcgcaggtcagccgggcgaggagccgctcccgctcgacgaggagcccaagaaaattgcactccgcgaggtcttcgagtgcctgatgacggccgaggacgacaaggtcaagaaggagctggcgggactcgtccaccgctaccgtgtcggcggcgtccaggtccacgaggtcgagaagccggtcatcgagctcgtccagacgctcgagggacagttcccgggcgacgtcggcgccttctgctcgttcctgcttaacgtcgtctcgctcgagccgggcgaggccgtcttcctgcgggcgaacgagccgcacgcctacatttcgggtggtacgtgccttctctgagtggccatcgccgccagggctgacgatccgctgcgtcgcctccctccccctctagacatcatcgagtgcatggcgacgtcggacaacgtcgtccgggccggcctgacgcccaagctgcgcgacgtaccgactctcgtctcgatgctgacgtacacgacggcggcgccggacgctcagctcatgtcgccgacaaagttccgcgggctcgacaacacgctcctctacgacccaccgatcgaagagttctcggtcctcgccaccaagcttgaggccggtcaagcagagatccacccggcgctcgagggcccgagtatcgtcatcgtcacggacggcagcgggacgcttgcctttgacggcgacgaggatggcgcgctcaaggttggcagcgtctggtttgtcgccgccgggcaggaggtgacggtcaaggccgagggcgagggtatcgtcctttaccgagccttcgtcgaggcatcatagggacacgctggggcttgacaatggtacctttcgcagacattgcgtcgagacaagggttggccggccggatgcgagcgcactgcccttgtgcggcaaaggcgttctcgtgccgaatctttctagggtccgatactgtgcactggcgtcttttgggcatcccatctctgactctctcattgtccttctgctgctcggtcgagttgtcgggcgccgacgtcaatcgtctgggcctgtggcgtctgctgcgcggttgcgcccgccccctttggccgccgcccgcaggccggcggcgcaaggcaagggggggggggggtcgagctcgtccctcaggatcccgaccgaccgaccgtcgcctgccttctctcctccccttcgttccagctggagcagtcagtctccccgacgccagagctcgtgcactgtaacgaccagagactgacgactggctcgcgtctcgtcccttgctgctccaggccgtcgccgccgcgcctccttccccgcctgcctccccctcatcaacaaccggcggcgagcgtcttcctcctccgctcgagctggcttttgcgcccttgcgactcctcttcctgccactcgcacgcacttgaaggcgcttatcggacgtatcagcaactcggagccctttgatcgatcgctgcgcccttcctctcctcgcccttctcaagcttggctccgcgtcgcagccctttgcatgcaagcgtccgacgccctctcttcagccggcgagccctggcgggccgacggtcgtgggccacactcctctgccatgcctacagctggcttttcggtcatctcgccggcgtcgagcgcgtacggcttcggcggccagtcggagtcgtcgccgtcgctctcgcagactgccggcggcgaggacgaggctgaggccgaggcggccaagcgtcggacgaaccctctgattgacctgatcgagagcgaaaagcgctacgtcgatgagctcggcatggtcatccgcgtgagttgtcttaatgctgaaaagcgctcggttggcctttgtgctgccagagcgtcactcgactagcggcattgcttcggtgaagctctcgcgctgacgcccggccatccccgtcgatttctatgctcccgcaccttcctggctccttcgcagaaggtagctggcgcatggtcgcggcagaactttccgccgccgctcctcgacctgatgttccggtcgatcgagggcgtctacaagatcaatcgcggctttggctcggtgcgtcgcgccgatttatggcacccccgccagacgtgctgaccatcggcacgtgcaccttccttccgacagaaactgaaggagatcgggccgaatccatcatcgcccaaggccctgggtgacctgctcatgcgctgggtgcgtcgccaagctcttgccgccaggccagtctccggggatcgctgctgacggtgctgcggctcgcttgtctctcgcctccatgcaacaacagatcgacgacatggagccggcgtacaagcgctactgctcgacctacctagcggccttcgacaactgggagccggtccagtcgaccgccgccctccactcgattcttgccgacgtctcgggccagctccaagctgcgccgtcgttcccgtcgccggcaggaggatggacgctcgactcgttcttcatcctcccttatcagcgtctgcgctactacaagaagctctacgcgcggcttctcaagaggtccgtcggctggcccttttactcgccggcgcgctcgactgacgacctctgtcgtccccacggcaccttgcagcacgcaacccggtcgcagcgatcacaacctgctgattggggccaacgagcggctcgacgtcctgctcgagcaggtccgcggtcgacttgagacgacggccgaagaccagagcagcacgacgaccagcctcccagttcagcaggccgagcggactagcaccgtgagctcgacggccaacagccggaccagcgagtaagtctcttgcgaggtcaactctcgcgatttcaaaaagccttcagttgaacagcccgaccctaccccgctgtgcagccaatccgtcttcagccagaacggccgcgactcgtccaactcagcatcgacctcgtacaacagcctgccgccgccgtccatgtcgcagattcacgaaaaggcggcccatcgcacgtccgatcccgacccgccgtctcccgtcccgcgcgagagcctgctcgatgtcgagcgccgactcgtgcccgatcggacgatggacctattcacgatgaagccgagggtgcgtgcagtccagcaaggaccgtctcgaatgtcgctgactcttgcgcttcatctcttctcagatggtgcgcctgcagatcagcccgcccggcctgccctttgtgcggcagctgcgcagctctgtcgccgtcgagatctcgtttacgccgacctcgactggccggccggtcgtccaccgcaaggcccatatctttcttctctcggacctcttcctcatgtgcgagtacatggacgagaaggaccgtctccagaaggcggccgagagcaccgacggccagcggccggacctctggctgtcgtacccgcccctcgccggcaagcacctccaggcccaaaccggatcgattcgtacgtcccctgctgccgctcacctggctttggcgagctagctgacgccctgcttgcgttccctcagccaactcgatcgaggtactcgttatgaagaaggagcgctttcagatcctgctcccgtcgcccgagctccaggcgccgatcctgcgcgactttcacgcttgcatcgactttgccaacagcagtgcggcttccagcgtcctgcccagcatcgcgccagatgctgaccaacaagcgccttcttgtagtgcaactcgccatccagcaacggtccgcagccggtctgccgccgcccacgtcgcccgaactctctaccgcccgcaactcgcccgcatccagcatcgcatcctcgaccgtcctctcgccgcaacaggccttcccccccgcacccttccaaaagcagcaccccggacagcagcgggtcgtctcgcaggcgccgtcgcagaccagcacgtactccaaccagagctctggcggagcgccgagcatcaatcagcagatggaccagatgtcgatccggtcacaccagtcgtcaagcagcccagcgccgccgccgcctcagccgcagcacaatgggccgcccttcaacggcagccgaacgctctcgccgcctcagtatgggcagcacaacggcggcccgcctgcccctcctccgctgcctgatgcacgcatgccaccgccacgcggcgccagccttggccaggcgctcgcaggaggtcggccgccagtcaggcaaatgagcggcggcccgcctcctgagggtccaccctaccacccccaacaggcacctcatcatcaaccagggccgccgtctcatcagggccagccgctccagcctggccagcacttgcatccagttcggccgggccagcccatggggcctcccttcccgcagtacaacgcccggccgcctccacccgggcccaacatgtctccgacggccgacatggcgcgctctcagtcgagtccatcggagcggatgctcagcccgggctacgcccagcagcccgagccaccgttcccttcgtctccgatgacgcaccgcggtccgccagagcaacggctctcacctctgcctcaggcgggctcgcctgtcggcggaggccagcccggtgggccgcccttcccggctttccgccagagcccggccgggtcgccgaacggcgcctacggcccgccgacgcccgttagtgccggctcggacggcgcgccgcggtcacggtcgaccgagcccgtcacgcccggcggctcgctcatgccgtcggccgcctttgccgaggtccgccagcgggcaatctcgacatttgacccggcgtcgggcacgtcgacgcctccagaggaggtgaccgatctgacgccgccgccatcgccgtcggccgagcaggatccggcggcgctctctggcccggccgagatcacggctcagatgaagtgcaaggtcttcctcaagcgcaaccacgcccagtggaagtcgatcggcccggctcggctcaagctctaccaccagcagagcaccaacgtcaagcagattgtcgtcgagagcgacggcagcagcaagacgatgctcatctcgaccatcgtcctgactgacggcgtcgagcgggtcggcaagacgggcgtcgcgatcgagatcagcgaccagggacgccgaacgtcggtctcaatgcttgcgctcggtgtcgttgcaattgctgaccttctttctcttgcgacgttcccccctctgcagcggcgtcatctacatgatccagctccgcaacgagcagagtgccggcggcctgtacgacagccttctcgccggaacgagccgcggccggtgattcgcctcagcgccgcagcaaacctctcatctctgagctcaagctcctgtccatcatgggcgctggaggtagccctcctctcgccgccggtcaacgcgaattttgccgacccagccgtgctgcgcgacccctgccgccggccgacgccagcagttgcgcgcgcctgcggttctctgtcctctttgcctcaagcccttgtctctcggcaggcggtcggcccatcctgcttccttccttcggtttctcttgcaccctgcaatcttatgctaccaactcgcgttgcctcctgggcgaccgtggcttaaaaggtgttcagcccgcactcatggccgtcggccgccggcgcgcccgcccgaggcatcgaacgacgtgacgcgccctcggcccaatgctgcaacgcccatctcgctcgtcctctcgctcctcctcccaaagctgccccagtagacaggcttcgaggtcctttcgtccttgtctgcataatccgccgtctgaagcaacgcaaccaatgtcgttcctccggtcgtcccgcgcgagttcggcctcgcagagctccgtctcgctccccgtcataaagacggtcctccaagagccgacgcttgtcaagccgcccgcccggccaacaaggccgaccgaaggcgatcagaggaacatgtatgaggcgatgctagctcacttctcggcgcccgagctcctcctcccagaggctgaaggcaggcctccctccgagccgctcggccggggcgagcgcatgtggctcaccgaggactgcctcctgcgctacctgcgggccaacagctgggtcctccagagtacgtgcgacctttacggctgcaacttgccttggcgtgccagcgctgacgacccttgtcgcttgtgttcctaccagcggccatcacaaagctgacgagcacgctcgtctggcggcgcgcgaacggccttgccggcgaggatggcggtgagggagaggacggaggcctgaacgccgagctcatcagggccgagaaccgcagcggcaaggagtgggttggactctcttgcagaaggacgcggacgatcaggcctggctgaccatggagtctgctggacccgcgcgcgcgcagctacgttaacggctgggacgagggcggccggccactgcactaccaggttccgtcgcgcaacgagagcaaggacgccgcactcaacgtcaagtactgcgtctgggtgatggagcggtgcgtcggccgaagaggctcttcctgccattacagccgtcgctgacgcatcaaccgtgtccctcgcccaggtcgatcgacatgatgccgccgggcgtcgagaagcaggtgctgctcgtcaggtcggtcaacgatctatttctcctgtcatgacgctgaggatgtgagctgacatcgtggctcaaccgatcctcttcagcttcgccggcggcatgtcacccccgccaatcccggtcgtccgcggctggatcaacatgctctcgcaccactaccccgagcggatgggcaaggcaatcgccatcaacgtgccctggatcctcaatcaggttcgtcagcgggctcgagaagggcagcaagaggatttgcggcgacgacgaggagcttgtcgctgacagtttggatcctccagttcttcaaactcatcctgccgctcatcgaccccgtcacgagggccaagctcagcttcaacgagccggcagtgcgtccgagtgcgcacgagaccctctttcagagcgcccgtctgactctccaccatcacagccctggatccccaatgatcagctcgaaacggcattcggcggccagtacaactttgagtatcagcaggaccagtatctgccgtcgctgctggagctgtgcagtcgccgccgagcagcgtaccgcgagcgctgggtggccgacggttcgcgggtacgtcctgagttctgactgggcgaatctaacctcatgctgacaaactgctttctggacgatgatacaaagattggagcgtccgagtgggtcctgcgaggcggcccacctgacgagtcggaccggcgaccagcctcggccgctcccgttgccggtctcgagactagcatggctgcgctacaggtcggccccaacggcaaggcagcgccggcagctggcattgtcccgggcgcccaggccgactctggcagcgacgacgatgatgacgatttcgtcgacgcagaagaggcatcggcgcagcaggtcgcttcggcgacggcctcccagacatcccattgaacccataaaaaggacgacgaccagcgacgacgacatgtagaggcccaagagcccgctcatctaatgacacctcgatcctccccgaggctaggcagaccggccgccagaatgctcgtagtgtcggaccgtctcctgctcctcagcctcgtggccggccgtgaagtctaacagaaaggcggcttctggcgtgcagccccagatccggccaccttcgaccgaaagcgaaccgaccgcgcctttggcctgacggcccgacgcccctccaggagcatagacggtgaagccggcctccctcccggccagtcgcgtgtcgaacacgccgacgtgaccgcgcgagcccatgccgccaaccacccggccgccatcggaccggaggaaagacgaggcgcacgagtacataggctggtcggcgatccggtcagtgaaggagagggcgggacggcggtttgcctgtcgcaggtcgtgtacacaaagtgacgaggccggcgacgaccagcccgacaagaggagcgtgggcgccgagggtgcggatgacagcgagagcactgccggattgcgggctttggcggtagcgtcttttgcggccgctggcagcaaagaccgaggatgggacaggacgctgccggtcgaatccgactgaaagacaaggagcgagcggtcgacactcggcccagcggcgccgacggcggtgaacgagcggtcctcgttgcgaagggccgcatagggccggcagcggaactgaggctcgccatctgccggccgaggggcgacctcgatgacagcgggcttgcacacgtcgttccgaggatagctccggatgtcgccggcgagcgatgtgacggtgaggtgatcagccgttatcgagagtgattcgattgctgacgccgggtgggcaagcgtctgaactagcatcgcccgagacggcggagaaggagccgacaccttaccctgccgtttcgtcttgaccgaaggcgttgcagatggtgaggccggcaagcgaacccttctaagggcaccggttccgaacgagagaaagaggtcggtcggcagagcggcatcttgtgcttcttggccatctaattgccagctgaccggcgcaaacataaggccagtgagttctgggctcagcagagcgctgcttcccacagcagcgcctgttgaggccgcagaaccgccgttactgtcgtgcgcggccagacgttcggcgcgtactcgaagagtcggcgcctgcgcgagtggagggaggagcggcgcagggccaatgccgacctctggtccgagtgcaacctcccagacccgatcgactgcagcttcccctagctggccgtcgggtgcctccttgaggtcgtacacgagcagcaaccgaggtgacgtcggcgaaggcaggacaattcgccgagcgctcttggccatgagcgagcgcgtggcgtgtgcgccggcttggttgcgtcgatgcgccgatcccgccgacgaggatcctggcggcagcgggagcgcggtggctacaaagcgacgctcatcgaaggcgacctgggcggaggtgtgcaggtatctcgcaagggcttgcgcaggccagcggtttggcgccggtgagagcgcgaggtccctcgcgccgggaaaggtggtgcgggtcaaggcggcccagcccacgctatcgacctgagcaggcataaagggccatgatcagcttcgatcatcgtgataagtctcgactcaggaaccgccagcctctcgaagcagcagtcggcccaggataaggagaagcagcttcagacgcaccgtcctgcgactggtcgaggccgtcgcagcgaagctggccaggtcgccgtagctcagacgctggaagatgtcgatcaggacatcctcgggtatcttgtccagcgggtgcctttgggcagaggcgaccatgctccgagtcgacggcgatccaactgaggaggagcaggtggtgggcgttcgaggtcagagaagctccgacgccgacgaagcatgcctgccgagccaggtcgggcgagcgcagcgaagcgtttcatcggagaccctgagcgatgttggagaacgagactaggaagctctcgtagtggcgactggctaagggagtgccggagacgaagagctgcaatcgatctctagtgcggacgaggcgagcggccctgggacggtcttggctcgcggacggtccctcagccgtccgctttccatctgaagtcgcgtctatcgattctttccggaatcgacgatgaggataccaagtcaggagctgagagctcctccagaagctagacgaccaggtgggcgagccgttcggacgaggtcgggccaggacccgggcgcgtcaacggtcgaagctcgcgggagcgtcatcgagctcgaagcctcacctgggcgatgctcctccttctcgacgctctcccttctttcccatcgtcctctttttgatcccctgccgtagctagcggacgccgatgctcgcaggcttgccgatcagggcgctgtctcgctctgccgcggcctccagctgtcgatcagcgaccggtctgcgctcaccgtcgccgccgccgctcagggctctcttcgcgtcggtttccgagctggtcgagcctttggggaaggcagcgcgaccttcaagcagtcccctccgcctcgagcgcactgctctcctggcagccacgaatatagctctcgggcatggtccgttccggccgcttcagctgtcgcgtcggatgtactcgtctcacgcaacgccggcacgacctctcgactcgtcgctcgcagctcgcctgcgacacctcctccggcggcggcctcgcctcctcgtcgtcaagcggcgaccgtcggtcatccagctgctgggtctcctcgccctcttcctactcgcctcgacggcttcgtacaacctgatcccagagacgaggcactttgctcaggccatcctgcgatgctcgcgcctgctcaccgccgtcgccggcgacgttgtcgagtataagcggacctttggcaaggaatacgcttcggagcaagagagggccgaggcttacagcgagtgtcacaggcggagcgctgtccgcctgctgcgtgcgctcgagaagctcggcggcatctacatcaaggtgcggccagcccagcgacgggtgcttgaccaggggagggggtccgaccgagaggagccgtgcgctgatggtctcgcgcctcctgcaccaccctctctctcagctcggtcagcatctggcatcggcggctgtcatcccgctcgaatggtccgagaccatgtcggtcctccaggaccggtgcccgccgtctccgatgcaagatatcgacgcgatgctccttaaggacaccggaaagagccgcgagctctacttttctgactgggatccgaatccgatcgggacggcctctatcgcccaggtgcatctcgcgaccgaccgccagacgggccagcgtgtcgccgtcaagcttcaacatcctaacctcgaagagtggttcagcgtcgagtccgtcgcttgtcggcccctgccacggcgttcagaccgttgagctgatcgactgcctctcatccacagccttgcaacagtccagttcgccgtccgcctcgtcgagtggctcgagccctcattcgaatttggctggcttgcaaaggagatggacgagtcgcttccgctcgagatggacttccgtgcgtgggcgacatctgtgctgacggcgtctcgcccctttggactgactagaagcccctatgttgctgcttgcaggtgtcgaggcgacgaacgctgcgcggacgatccacgacttcgagcacatgcgacacacgtcgctatacgtgcccgaggtcaagtgggtcgagaagcggatcctggtcatggagtgtgagtccgagcatcggcgtgattgtcgattgggcatgctttgctgaccgggcctgctgacctcaagacatcgacggagcccgggtagacaacctcgagtacctcgccgaacacaatatcgaccgcaacctcgtctcgaaggagttgtcccgggtgagcaggcctcaccttcaccgccctctggatcttcgctgatgtgaagcgccaccgccttccagatcttctctcagatggtatatctcaacggatgtgagcagcccactctttctcgaccgacattgcccttcgactgacagggcgcgcggtcctcgcagtcttccatgccgatccccaccagggcaacgtcctcatccgacctcggccggctcattcgcgaagcccgcacaactttgaggtcgttctccttgatcacggtgcgctctccagcctgacaactctgtcgatcggcttgcgactgacactcgtgtcctcatccaggtcaatactttagtctggatccagagattcgaggtcagtaggcaaaccagcgcagctggctgtctgtttgtcgctcacccttctcgcctttcgcagtcgcctacgccaagttctggctcagtctcatcgcgccaaactcgcccgatattcaggagcagcgcaagtcgttcgccaagtcgatgggctgcgacgagagcctctacccgatcctcgagagtgcgtcgccttcctgttttcgcaggtgtcgagcgcaggcctgggctgacgagactttgactgtcatcgtgcaggcgctctgactggtcgggtcgggctcggcgcagaagagggcttcgacgtcaacaagctcgaggacgacggccggccgccgctgatgaagcagaaggccggctcagtgctcgacatgggcgaagcaaccgagtttgagctagagcacatgcgtcgcgcgatggtcgagcgtgagggtctcctcgccgacatcttctcagtcctccgctctgtgccgaggtgcgtaccgtggcctcatcacgtgtcgaaagtccgggctcacctgcaaagagtggcaccatatcaggcgcattatcatggtccttaagctcaacgatctgactcgtgggctcgatcggagcctcgccaccacccacggaccggtgagccccttcgttcagctcgagctgcctttgaccggtagctgatgcctagccggtcgtatcttgtcactcgtacagtcgcgagtcttcctcgtaagtcaacactctcgtcttcgcgacagagcaagagatgagcgctgacactccttgccccgacagatcgttgcccgctactgtctgacggccgtccacaaggccgaacttgccgccctgcgacagcagtacgtctcgcagggcgtcagcttctcgctcctcttcggctacctgcgctcctgggcgtcgtaccggtggcggaccgactcgctccgcttggtagaagcggcgatggacacgcgaggctggatccggaccaagcaggtctacctccgatacctcttccagcgcggccaagccgaagcccggcgagcggctgccggcctgcctccggtcgtcgcatagagaggctcgccctatacgaacctcgccccgcgatcgttgtagactgccctgggattgcctccccttcttgtacgctaggcatgaccgtgatgagcgacggcgaagggcgcaggaccgcgtgaaagcagagcggctaaggtcaatgttttacatcagggatggacatgagagtcgtgtcggtcgtttgtcgtcgagtggttgggcggacgctcaccggcgcttggcgcgcgaggctcctcccccttaagaaaaaagtcgagagcccgagtgagtcagtggacggacgcagcagtgtcgagggcaaagtttgacgctacgcacagcctttgaagccctcctcatcagaattctcggcctgaatgagcttcttgcgcccgacccgcgccttcggccgcgctgggggagcgtcctcctcgtcgctgtcgtccagagtggccgtcgtgcgcggcgtcggccggctgctcgccgccgccgccttgtcgtccgacgctgcgagagcaggaccggccttcttgcggccgcgggcggacgcgcgcacaggcatgtcatcgtccgagtcgccagcggcaatcagcctcttgcgccggccaacgctcggcccagacgtgccggccgagccagtttgcgtcgcccgctcggaggccgaaccagagtagctcgcggccgaagcagaatcgacgaccgatggcttcagttcttcgtactccgcagcctccggcttgacgtcgttttctgccaggaatggtgacggtaggcaatgagtgagcagctgaggaattgagagggacaggaagcgttgacgcactgccgcgggcacgcaaggcgctctcgccgccgacggtcgggatggccgggccctgccggcgcgtgccgcgaggtgcgttaaagtcctacagggaacgaacaggctttgtcagtgggcgagccatcgccatttgcacgcaagtcactgaccctgttcgaccgaaacttgccgaagccgcggctgtcggtcacgggcaacgcggctggaccgcggcgtgcgagcttggtccgctggaaaaggggcacgaggacctcgaccaggcggggctgatcctcgtcgtcttccgccaccgccgccgtgtcgacgccagcaggccgggacggcagcttggcaatctcgagattgttgaagtcgacgtcgagcgcatcctcggcctggcccttgcgcttgcgcttgaccggcgcgcgtagaaagtcggtgtctgaggcaccggtgtcgtcggccttgcgcttcgcccggctcggtacgggcggcggcggcatcatgccaggagcccttgactcgggcacagagtcgaccatggccgacgcctccctcgagctctgcccgaccgagctgacaccgggatcagccgcttctacgtcgtccatgggctgatcctcaactcgcgcccgcttgcgcttctcctcctcgatcgcctgctcggcccggcggcgcttccgctggccctcgacgaacgcctcgccgtcgtcgtcatcctccccctcaactttgccagaagcaagcgactggccccgtgccgccgtcggaggctgcgaggccaggtcgccgcgactcttggcccggatcgtctggtacaagctcttagctcgctccaactgaggcgctggctcttcaaaggagtcgtcgacgaaaggctgcgagccggccgacagagaagactgcaaaacggacggcatcagcaggggcccccactcttcagtggttgaggcagacgcagccacgtacatgagctgactgcggcaacgacgcaagtgggactggagcttgtccctccgcagcggatgctgcctttcgccggctccgagcggccggaggggggatggcgctgccccagttgtcgagtgggttggttgacgtcgtcgaacgggatggcggcgcggtggcctgctgatcaaatggaagcgaggcttgctggttagtgcgtagactcgctgccgtcgtcacacagaggcaacaaacgcactggaacctgcgagaccggtctgagtggtggactcggaggtgcaacaaggatgtccagcgagaggtcgccaatgtcatggtcgtcgtcaccgatgtcaaaggatgtgtcgactgcggagccgagcgaggccttgtctgggctgctggcagggagtgcggcagagggagcgacgtttggggaaaaactcggatcgggctgaccccgagagctggtgagactggccgagacctgggagggcagggaatgggctcctggagcagtcgttgcgcgcgtcgtccttcagtacagcgtctagcacttggattggtgaaagacggacgtggcgtaccgtcacttgcggcaccgctcagccgagaagccttgaaaagaggcgtcgcgtccgactgtaagagcgcgaggccgagagccttcagtgtggccagcaataggccgaggctgcaggccgagcgaagtccttccggtcagcgctgttcgcgcgatttccgcactcgacagcggacgagactgacctctcaccagggatctgaacgtcgtccatcgccaggtcggcccgtgccagatcgtccgcgagcgactgtccggcggcgagatagatgaggcccgagttgcgcgcagcagccgggatcgtccggcccgcttgccgcaggtaggctgggtaggccttgtcggccgccttcttgtgctcgtagagaacggcttggagcgaggcccgaataggcgcgacgagcttgctcgggttgacgacgacaaaggtgccgccgcaacgctccacgacgcgcttggccgtccgcgtcgccaggtcgttctggaagggcggcggatagagtcagtgtcctcgaatgcagctctatgtcggagagaggccgagccgacgcacgtcgttgcccaacccaacgatcgtcagccccgcaagaagcgtcgtgcgggagccgtcccagagcaggcttcctcgggcggcgtcttcgccggcgacctcaaaccttggcgcatgtctatcctcgtttggccagttggcgatggcgtcgtgctcgagcgccgaccaccgctccttcggatcgctctcgcggccagatcctgagagggggccggcggcctctacgagtgcagtaacgaaagagggcgacacgactcgcgcctcgccggagagggcggcgaggaaggaaggcttgctgaccgccttgaccgtctcgaggacgaggtgggtgacggggccttcaaagtccttcttggcaaccttgatgcctgtaggagagtcgacaaaggcacgcgtggtcagccggcgacctcaggcgcgagcgcgcagtcgccccgcctggcacgcaccgagcggggcgatcttcttgacgatgtcggcttggactctcgtcacgacgtcgagcttgaggacgaccggtcgccactcgaccctgatcaagaacagatagatgggccccgatgtcagcggctccaaagtggggggtaacgaggcagctgaagtaggcactcaccggaaacgcgggctggtcgtcgagaaggtaatgatgtcgccgtccttgagagcccacgcggcgggagtctccttctcgtcttctttcgggagatccgtctcgtccgagctggaggagacgtggacgctgaaattcttccattcgaggacgtcggtcgtggtcgtcgagccgtcttcacgtgtcgtcgtcttcgtcttcgtgaccggggtcgaagggagaggccggatcgtcaggcccggccgggcgcccagatccgcctgcagttcgagcacaagagtccatcgagcgtcagctcgtgctcgggcgcatctggatacgactacctcctcgacaagggaggtgtcaacgatcaggatgggccacgactgactgcgtccagctccgagtgcgggccgacatcaattgtcgcgtggctcctgctgacgctcttgagcttgacgccgagaagtaaccggtccgatcgaccgatctggtacgtgcgagctggcagcagggtccttgacgaagctgctcatgcgacggggaggagaggatgggaggcgctcgggccgcaccgtcagccggatgacctcccctgtcgtggctcgagctggccgaaggtgcgcacctgagtcctcggggctgtccctccacggtccggtaatgacccacatattgcggagtgtggccgcacgagtaggggtaagacgagagaggacgggtgccgacgagatggttaaggtcaggggtggccgagctcagggcagactcgaggcgcaggtcgaagccggacgacgttcctccatcggtcactcgccaacgactcactcagcgcttgcagactctcggcgatggcttcgaatcaggctctcaagcggagctcgtcgccctcatcggacgaggaggaattgccagagaagaagcagcgatcgtacggctcggtttgtgcgtcgccctgcctcctggactcccgccggcgagctcgcctcgggcgccagctgacccgagaggcacccctcttttccggctcgcctcagctggcgtcgtctactctcagccagccgacactggccggggcacgcacctcaacacgaagctaacatatgccgtcggggcgctcaaggtgcgaccttggcggggcctgaggcgctcgcccgctggtcctcgcccgctgaccgttcgtttcgcaccttctgcactcgccaggatcggaaggggctgccgacccgtgcagaggacattgccatcatggccaactgggaggacctcagctgggacgccagccttcaggaaatgctcaagcggcacgagcgcgtgatctgggactcgcgaaccggcctcttcagctacaaggtcaggcccgcctgcaggtccacagtgctgccaggtgaaggctgaccgcgcttcttcttgacccgatcaggccgaccacaacatcagcacgccagcgcagttgctgtcggcgatcaaggccgccaaggataagagtggcggcgtcgccgtccggtcgctcaaagagtcgtggagcggctcgcagcaggtcctcgacgagctcatcgaacgcggcgacgtcctcccgatgcggccgaagaaagatgggccgttcaagacggtcttctggaacgaggtcgacctcgagcgtggcggtcgggccgttgacaagggtgcgttcgactcctggcacgtgacgagcttgccaaaggaggctgacgactcgctacgctctttatacgcagaattcaaggacgcctggcatgcgctcaaggtgccgattgacgtcgagaaggctctccgggagcgtgcgtttgttttctggccgcttcccattcggaactcagcgctgaaccatgcctcactgtttcgctggattcctgtaaggtggcatcaagccggcgcaggtcgagggcggcgacggcccggccaacgccggtcagaagaagaagggcaagaagacgggcgcgcgcaaggtcaagatcacgagtgcgtcggctcctgtgtctgcgtcgtcgttactcggtgccgcagagcgtgactgaccgctgttctcgtgtttgaccatcccgcctcgctcagacacgcacatggcctcgctcggcgtcgacttcacgaaggaccgtgtcgtcggcgagtagagtgacaactctcttgtcgattcgtatcctgtgccccgccctcgccacggtgtttcactcgaggccttgagccggcgacgcctggtccctcgtccgacgtctttgcaccttggccccccttgccttcgccggtcgccgtccattcgctcgcgcccgcccattgtcactgtcctcggcctcccggcagctgcctggatcgcctgctcaggggtcgacgccctcgctgggtctcggcgggcaccttgatcccgccgagatgggcttcgagcatcgctcgcagcgactcattgacggtagcgatgcgacagattatatgcatctgaggctctattgcggttcggtgacgagaatgcaccacccagtgggcgggcggccgcaaggtaatcttcgtcgatgaccggcgcacttcggccccatggcaagccgcgactcggcggccggccatctgcgaacttgagattaattcgctccgacggtgaggttgtcgtggctcaatgacgagtagcgttcgtagctgaagccgtttgctgactgcactgtgacgtgctgttgaggacgagcgcatcgccgctctgctgagggcgacagcttcgcaactcgcgcccgagttgcaaatccttcgacggcgacgagctcccggcgcatgcattcttggtggaggctgctgcataaggggctaggttgcacctctagcttgccgtctcttgcgtgcggcggccgcctcggtcgggtggcggatcggtacgcgctcgatccggtcgcgcgggtcgatgaactcgaggaacgcaaagaggacgtgctcgagcgcaaatatgacggtcatgatgaggccaaagactggaccggtgtcgcggagactgtgagcaggcggaaggacagaatacttcagcccagaccgagctgcccagggatacccgcctgcgcacgaaccggaccatgcgttcccacgtcgaccgctccggaagggaaaagacgtcgtcgtagacgcgttcggtccgtcttgcgacgtcggcccacgagtacatgccctggacgcgagcatgtgcctcgagcgggtcgtgcgcgccggcgtcgacgcggtcgatcgcgagcgtcagcgcccggacgacgtcttcagcaaagcgcaagaaaggacagtgcctttagctcgcgaatgcaaagggccacaccagaaaatggtccagccaagcaagatggtacgcaccgtcctcattcggctcggcaaagacgaccatatcggccggcagaatctcgggaatgccgccgacgcgcgtgctgacaacgagcaggccggacgaggcggcctcgataagcgcagtcccaaacgcctcggtcagcgacgtgttgagaaagatctgcccgcgtcgaagggcctgccggacgggcgagaggacgccaaggagaatcggctcgagactttagcgggcttccgcaagtgctcgaggtcacaggaggacgcaccgaagagacgtcatccggccgaacgttgccgaggagctcgatctggtcgtgcagtgtgtgctgctcgcgcatctgttcgagctcgaccatctttggcccgtcgccgccaatgacaaagcgcacacgaggaaagagggcacagacgtgcggcgccgaggcgatgagcaggtcgatgcctttgcgatagactagccgagcgacgacaacgatcgtgactgcgagcgaaagttatgtgagcggaagggcgtgagcgatcaaagaagagcagccgggcggccgagacgtactgtgaccgggatcggtgcgctctggcgctggaggaaacgctgacgggacgacggcgttcggtataacataggttcgtttcggatcgagaccggctcgaaggacggtattttcccgcctacgatgaagggcgggcatcgccagtcaacatttcgtacaatacgagctggcgcgaggggacgaacccagtgtgcgagacgcagatgcccgcgtcgagattgcgcagacagccccggaggagtttgttggtgaggacgccgacggcgtcgccgaacccaaagagcgagtgatcggtccagacggtccggaccccgagcagaggcgcgtgaagcacggcctcgagcgcgagagacgaaagcgaggcatggccgtggacgagatcgatcgactcgcgaacgagcagcgaccggatgtacggcagaaagagaagaaagttgggcagcgtcgccgaggctgtaaggacggggaccggtaggtagtagacctttagcaggccctcgacgaggtgtcggacgccgagatggcccgggtgagagtgcgtgacgacgacaacctgtgcaggcaggacagcagggcgggcgcgaggcggcatgagatgaagctgctcgcacgacagacagcatcaaggcagacggacagtatgaccacgtgagatgagctcgagcgcgagcatctggatatggccctcgacaccgccgacactcggatggaagaagtcggacacgaggcttcagggagagtcagagggcaggggacgcgactggtcatcctcggaggccgcagctgcggcaaggagagggacaaacgcgatccgatacagccgccggggcgccgcagcctcgtccatcactcgtgccgccgatgcgagtctgttgtctgcgacagctcgtccggcagacggtcggtcggccaggatgggggaggagacggtcggagggtgcgcgtcgcggatcgtcgtcgtcggtggtcagaccacgcggcggcggggagagaaaaaatacaaaaggatcggcccgagcgtgcccatctcgaggactcagccgcatctcgcctgtcacactgcctcgcctccattcctcttcccccgcaccctttctcttcctccgctccctttctcttttctctcgacggccagcatgtacccgcagcagacgggctggcagcagcagccgctctacggccagcagacgggcttccagcagcagcagcagcaacagcctcagcagcagggcggcttcgcccgcccgcccctccctccgcaggcgtccggccaatactcgttcctctcggccccgccgccgtcgtcctccggcctctcgccccaacagacgggctggcagcagccagctctccgccagcaggcgaccggatggtccggcgccggcctcgtccctcaggccactggctggcagggcgccggcggccagcagcagcagccgctcatgccgcaggcgaccggctggcacgacccccggctgcagatgatgcagagcagcttcatgccgatgaacacgtccgctgtgagtcttctcctctgtacggtcgagcgacatgcctggcggtgggagcttggtaggaccctcccgcgggccgggcgggccgttttcggacgcgcggcgagggcgatgagatgcccagctgtcgacaagctcggacgatgagccgacgactccacctgatcacccgttgttctcctatagcccttccagtcgggtgtgcccgtcttccagcagccaactctgcccgccggcaaccttcagtcgtcgatgaaccttgtgcgacccgcttgctccgccttcctctgcccactgcacccctcgctgacaagccctaccctttccctgccctatcaaccctgcagctcaaccagacgccctcggttaagacgccaaaaattccgtgggcgctgacgaaggacgagcgcaagaattatgaccagatcttccgcgcctgggacaaggacggcagcggcttcatctcgggcgagatggctcgcgaggtctttggccagagcggtctcggccaggacgacatggcccagatctggtgcgttctgctcgctcgatcacgatcgcggctatgagtcttcgccgtcagctcgtggctaacattcgcacctgctttcgtgcggtacaggacgctagccgacatggacaaccgcggaaagctcaatatccaggagttccacgttgccatggcccttatctaccgccggctcaatggcaacgacatgccggccgtcctaccggccgagctcgtgccggcgtcgtccaaggacctcgactcgaacgtcgacttcctcaaaagtctgctccggaacgacacaaactcacgctcgacctcgaccgagctgtcgtacgccaagacgcggtcgttcaacgacgcctcgcccgccggcggcgagcgcaagaaggacggcacagtctacaagcatgacgaggatcgcgagctcggcaagacgtacaagtcttcctcgcgccacctcgaccgatcgtctgtccggaccggaaaggagagtgcgtcggacgaccttgcgcagatcaagcgggacctcgccaacacgtcgtcccgactggacgaccggctcgaggagcgcggccggcgggacgaggaggacgagctgctcgacgaggagatgaacgacctcaagcgtcgggtccggcgcattaaggacgatatcgagtacgtctcgtctggccggccgacgagtcagaaggacgaggagcgccgcaaactcgagcgtgaactccttcacatcgcgcacgagaagattccggacgttgagcgccgcatcgaggagcgcgaggagcgcaagaagcgcgaagaccgcgagggcgtccgagcgcgtgaccggcgcaacgaccgctacggcggccggtacgaggaccggggggacgacgacgaccgcgaccggggctaccgcgggagctacgaccgcgacgaccgggactaccgtgaccgcaaccgcgaccgcagtcgggaccgttacgactcatacagctcgtcctcgcgcgaccggccgcgatcgccgccgccggcaccagccccgccagctcactcgcttgcggcgcccgcagccccgccggccccgcccaagccgacggcctcgcccgctcctgccggtcagacgcgcgagcagcggctcgccgaggctcgtgctcgggcgctccagaagcttgaggaccgcaagcgcgcgcttggactcggctcggctgagcctgaagtcccgacggtcgactcgagtgtgagcgagcggatcgagcgtgagaagcgcgaggccgaggaggccggcaagcgggctgaggaggagcgcgctaagaaggaggccgaccgtcgggcccggctcgaggccgagaagggtgggccggcaaagccggcttctgcgcccgtcccggcgccgccggctctgcctgcaggcggcgcaccggccgtcgctccgaaggctgccccgccgccaccgaaacctcggtcaatcctcaagtcgcgcgcaccggctccgcccccgtccaaggcaggaccgtcgcctgccgttcaggaggcgacacaagatgaggaggatccggtcgagcgccagctccgcgagcgcgaaacgcggctcaagaagagcgctgccgaccgggccaccagacttgcggctctcgaagcagaggaggaggaggagcggaaggccgaggaggctctccacgcccggcgccagcaggccaagtcgtcggccgcttcgacgccgcctgcgcccaagtctccggagccgtcgcctgcgctcgccgtcccggctgtcgccgtcgctcaggcgtcgacgagcccttcgggcggttcgctcggcgcgcacaacccctttgccaagttctctgcagttggcggcgccggctcgtccgcggccgcgagccctgccgcacctgatgcggcaaagttcttcaagccgccgacgcagacctttacgccgccgccgatggctgcgccggtcgccaaggcgccaaccaagaaatttgtcccgacgccggccgacgacgaggactgggacgtcatcgaggacaagggcaacgaatctgactcgtccgacgattacgacacggccaagcggcgcaaggccgagctggccaaggcgctcttcggcggcatcatgccgtcctcgtcgcctgccccctcctcgaaccctccgtcggccgctccgacgccagcccctgcggcggcgagcgcctcgccgacagacttggccccgccaaagaacccgatgctggccgcgctcggtggcggctcggccgagcctgctgcccgcggaggcctctttgcggccattcagggcggtgccaagctgaagaaggcagtcaccgtagacaagtcgagcccggctgtgacgggcgccgtcgtcggcgatgccgcgcctccagctcacatcagcgacgttcttcgcgccgtcagcccgccgccgagcccgcctgccgacactaaccgggctgagccgaccttggccaacgccaaccggcagtcggtcgactggtacgcgggcctcgccgccaacgccccgtccggtgcctcggccccgacctcgcttcctgcccaagtcgaggaggacgaggaggaggatgctcacaccaaccggcaggggtcccaggcgcccgtcggtgcgctcgatggcgtcgacatgagcgtcagcctccgggtacggacgctcttttcttacgacggccagcgtcccgaggacctctgtcagtaactttgccagccgactctcgaacgtgcgactctcaaactgacgagcgtttcttctcttccgcagcctttaccgagaacgtcatgattgacgcccacccggcgaccgacccggagagcccttggtactacggcatgacgatcaaggaccgcaagtccggctggttcccgtcgtcttacgtcgccgatgttgcggatggtgcgcaacactcaactcacttctgccggacgaacctcttgttgacgcagtcaccgcttcgcccgcccccagtcgtccaggccaaggcgctctactcgtacaccggctcgtcggatcaggagctcccctttgtcgagggcgacgtcctcacgatcgttgagcacacggacgactcgtggtggaaggccgtcagcgacggcatcgtcttcctcgtcccggccgcctatctcgagcttcagggttagtccgccctgtcgtctgctcagccttttggtctcgcccctcgatcaaacacccgtttacgcccgccccccgctgctccttctgtgctacacaggctgaatcacggttgtctcccccacctctttcctgaccgatacatgacgtacgagatgaacaggctcgacacaagccgacaaggcagcgctgccttcccaatcgcccatgccaaacgccgtcctttcttcacctgccgtcacacctgcgctccgcgaccacgacgcgagcatgcctgagtctacgacggctgcggccgatgcgcgagtcgccgctagactgcggtcaggctcgtcgacgtctcagggcggtggcgagcgtcgtgcgcccccaccggcaccggctcaccctcgtcggctgtcggcggccggaccttcgagcggctctgctgacgcgatgccacaggagaacagcgacgcctcctcagactcagaggatgatctctccgaggaggctgacgatgacccgaagacgcgcgagcggcgcgagtctgagcgtctccgagtgctcgaggcggctggcctaagggtgactgtcgactcttctccgagccctcggcctcggcgggcgcgtcgcccccctccctctgctccccttcggcgaccgcagtccatggtgttggatggcggctctcatctcgcccggccaaagtcatttgagtcaagctcatcgtcattgccaccctcgcccgcgaccgaggagcccgcccctcgactcgaggatgcgtacgaccgctacgaggcgctgctgtcggcccaggccgagaagccacctgcttcgctggcagccgtcccggaccactcgtccccgagccttctaccagcctcgccgtcggcgtccatcggcagtgcggtcgccaccggtccgagagaaggcagactcagccagatgatggccaaaatctcagccagcgtcgctccgatggccttgccagagccgagcaagaggctatcggttgtcaacatcagtggcccatctcggcagtccatcgcgtctcctacaacgtcgtctggcgtcacacgcgcgacgacgccggccgccgaatcaacggtaaatcaactgcaatccttttggccccaggcgttggctgacgattccctgtcaccctcgcttctcagtcttgggcaagcctgtgcgtcacgatgatgttgcccgtcggcctgcaggttgctgatgcgtcgcgctcctctttcttttgcaggatcggcgaccacagcatcctcgactcactctctggcaaggagcgcaagagacaggaagcgatgttcgagttcatcgcaacagaggcatcctacgtccgcgacctgcagcttatcgtcggggtccgtcggcgctcttccgcatgccatctggtcaggctgcgctcgctcaaccttgctgacactggcggctctgtttgcaggagttttacgcgcgcctcgtcaagatcctggacgacaaggagctcgtcgtcatcttcgccgttcgtccggccctttgatcgcctgcaatggcggcagtgggcctgaccggatcgccgttgctcttccccctcagaacgtcgaggacatcctcgtcacgtcgaccttcatgctttcggagctcggtccgtctcctttcccagtccataaacgctcgggcgaatcgcctgctgatgcgctctcgttcacagaggagcgccaaaaggcctctcgcttgtacctgtcgtcgatcgccgacattctcgccatgtttgtcgacgtcccctgggctgcgccgcttgctgccatctgatcactgctcccttactctgcttctcatcataggcacatgcagaatgtcgagatctacctgccctactgctcgaaccagggcaccgccatcaaaatcctccagtcgctgcgcgaaaagaacgcggctcttggctcgactctcgtcgtgcgtcctctgtcgctccgaggctcgccctgcagcgctgaccggacagtgctgagctgacctcccctttcatgctccgcaggcaatgcgctcggagcctgcgctgcgagggctagacctctcgacgtatctgctttcgcccatgcagcgcatcacgcgttacccgctcttgctcaaacagatccacaactacaccgagcctggcgaagaccggcagaagctcgagtgattcctctccaactcttcctccatatcgcgtccgcttggtagctgatcgtcaagcgccctcacaggatggccatcgacgaggctgaatgcgtcttgaaccggatcaacgagcagattcgggcgcgcgaaagctttgaccggctcgctgctctttcgcaggacctctgggtcggaagcggacgactgtgcgttccggtccctcgcggccgcgtcgatgctgaagctgacaacgtcctttgacagcgatctgacctcacccacgcgctcaatgggccctcgtcgcttgctccgagagggcaaggtgacaaaggtcggttcagcttcttcctgctggagcttttctggacaagcaggctgatctgagtattgcatacggccagggcaagggcaccaagcgcgagctcacggtcgtcctcaccaacgacatattggtccttattgaggcctcgcggactcgtgcgtcgatcgaacaccctgtgctccttgcgcgactttgtctgacctttcctgccccattagtctaccggatggtaaggccatgccaacaactgccttctggctcgcactctatactgacctgtcatttcgttcccgcgccagccgatgcccctcaacgagatctcggtcgcagactacccgtcgtcttcctctttcggcttcctgcttgtcccacgctaccgcggcgaccgcgtcctcctcaagactagcaccgcccgagaggcggccgaatgggttgccgctatcgagcgggccatcacagacgaacgacgggcgcggctcgacatgtcttgagcgcctcgctccccctttgcaacgactcttcacgatcttatgaccagctgccagagacattcgccgtcagggtcagaggtagagtacagcatctatttccgctcatcctggctgaagctcgggtacagcttgccaggattgaacaggcccttgggatcgactacgaagagaggcgagagtcagaggccactcaaagggcatgggacaggaacgactcactcgtctttttgaccgactccatgagcgcaagcgtccctctgccgagctcggcctcgaggtactgccaaaaaagcaatccggtgatcagcctctgccgatcgaacgccgcagtgcaagcgaagacgcacctcgaccttgccgagaccgacaccgtgctcgcccgtggccgtgccgtcgagcctctgggcggcgtagaccatctcgtgcacagcctctcgagtcttctcgagctcctcctctccatcaaagaggatgagcgagtggaagttgccgtcaccgacgtgtctggaaatgaataagccgatgttggtcagctgagtggccgcgagcctcggccgggagagaaggcgcacccgacatggcaggcggtgagtccccgcgcagcaaggtccttcttggtctgctcgacgagagtcggaagcgccgagattggcacgcagacgtcggtcgtccagcacttactctcgggctgaagcgccatcgcgctccatagagccaccttacgtccctcccagagcctggccgcgtccgcatcggttttctgtcggtcgacgagcgaaggcgtcgggaaatgcgttaggcgacctgtagacgtcgatgggtgagaccaaaaggacccacagcaaacgaccagtctttgccgccgtgcttcttgacgagagctgcgaccctctttgagacatccttcatctgctcgtccgagccctggaactctggcaggggcagacatgtttcgacagtcagcatgcgatcctcgagtgacagaggtacgagcttccaggcacatactgaaaaagagcgagtcgcgctctgggtatttgacgccagcgctgcctgcctgattgacggccttcatcatcaagctatccaggaactcgacgcactggaccgggtagccctcgccaaccctgttgaagagatgtcggcaggcccgtcagcgatgcttgcgccaggagtgagaaagagcgagatgcgctcacacctcggtcgccgcggcgacagcgtccgcgacgctaggaaagttgacgacagcgcacttggtcggcagcagcggggccagtcgaagggtggctgcacaatgagagatggggagcgcaaagcaacgctcagtctcttatcgtagcaagtcacgatgaaagaagcagtcgtaccttcggtgacgatgccgagagtcccctcggcgccgatgaagctgtcggaaaattctgcggttcagcaaagcagggcttccttgacagtagactgaacgcacagcttggtcgtatcccagccggcggccgatttcctcgcccgctgacgcgtcttgatgacctcgccgctaggaaggaccaccgtctacgcgagagagagcgtcgacttgcgtcagcaagagcagtagcaaacacgctcaagattgcacatcggaccgacaaagtttaggaaccattctgcccgggcagtaccgtagcggacggcattggtgccagagcagctagtagggttaagcgaaaagcattagctcgaaggtgcaagaggctttgaagcctgagtgctgctcctaccctgtagctgccattcctctgtcaccaagccctaagcgtgtcagcagctggcgaagtatcgaaagcctctctgatgaagcgagctcacccaatcgttgctccaggtgccggatcaagctgcaagtgggccgagcgcatgtcagacgccgagagaacgacaaaacgcagccggcagcagcgacagacgcacagggaagaacagcttgtgctctttgagtgtctcgttcaagctgacgtaactgacaccaggctggacgacctgtggcggcggagggcgagcgggtcaacttcaactgggcctgtccaatgatttactaaggaaagagggaagggacgactgacgacgtcaccgtcggccactgttaagcgtcgcgaaggcacgggtcagtcggtcgccgtgcatgagagctggtaaggtgactagggtgagacgcaccatgcagcgcgacaatcttgtccatccgactcaagtcgagcgagatgcccccatgcggctgaagggggagagagtggcatcgtcagccgggcacccgaacagttagcgcgcatgacagacggaccgagctaaagtggccctcgagcgaggttccgcctgagaacggcgtgaccggcatccggtagcggttggcaatttggacgatactctggacatcttccgtgctggaagggccaggcagcgtacgtggaccaaggtcagcgctttgaacaagagtcgtcgagctgcgccccttttcgaagggcgtacctcaatgcccagacgacgaccgtcggcttgtgctccgagtgatagctccaagggcctattgagagtcggagatcgtcagtcgtaaaacaggcttcacacttgggcgaaagatgggcgcgagatcagctcgagggacgcactgatgccgtgactctcgaggtcagcgtcgtcgaccgagacgtcgtccggcctcccctgccgttcaaagagcgcccttagctcgtcgatgcctgcgagaaagtcgtcggtcgagccaaacgccggcgggtaagcctcagccgccgctttgagccgtagtgcatagggcgacgtcggccggatgctgctgttgcccgacgccgaggtcgagcctgcaccctcggcgccagccgttttgccgatcgagaggccaaggccaaaggcggcgatgatagctccggcaccgatgagcttgacagctcgcgggacggacgagacgacctcggcgcgagtgacgggctccggcttggctctaggggcggccgagaacgaggaggctgctcggcggaggtgggctgagcgctcgaggacgcgagaggcgacggtcgccggacgggtcgtcaacggccgggcggagcgactggcggccgcaaacatgagcggcgagtcttgcggagagagtttcggcgtgtgactgaggtagcggaaggaggagtgtgaaagatggagaagaggtgctgtcggtgaggttcgcctctcggccgggcccgaagagcgcgccatcagcgcagcccaagacgacgtgcaggacgagtccggcagcctgctgcattcttggcagaggtggccccgctccctggcttcctcagtctcgagtccggtcgactgcgtccgtccgaccgttgtctctagcatgcaagctcccgcaaggagaaccgaggggacggtcaagcagcggccggtcgccttacgtccggctcgaacccgcctcgaacgccataacgacgatttctcgaaaaagtcgattgttagaggtcgccgtcgatgacaggcgggcggattacatgtagatcaaaggaagagcgagcgacggggccgagcatggcgcgcgccgcgacggggaagagaggaacgccagaaggagaaggcggtggacgcggggaggggcaaccttaaaggtcggcgtcgtcctcgtcgggcaggggcgcgttgatggccgcctgggcgtcgttctcgagccgctgcttgtcctcctccgagaggtgaacctccgggggggcgagcgcaggggcggcgacaaagtcgagggcggggttgctaaagcgggtcaaagtcaagagtcagctgctgctccaggagcctgcgtcgagcctgaagcgcgagaggcagaaggacgcacccgacgagcttgcgcgcgagccagaggaagggcttctcaaagttgtagttcgacttggccgagatctcgaagtactggaggttcttcttgcggtggaaggtgacggctccaatcttaaccttgcgctcctgcaagcgggcgggcgggggacgagtagacgggtcagcagtctgcgccaacgaaactcgcggcgccttcgctcgagaagacggaccttgacgtcaaccttgttgccgcagaggacgatcgggatgttttcgcagacgcgctcgaggtcgcggtgccagttggggacgttcttgtacgtgatgcgcgacgtgacgtcgaacataatgatgccgcactggccctggatgtagtagccgtcacggaggccgccgaacttctcctggccggccgtgtcccagacgttgaagcagatggtgccgaagttggtcgagaactgaagggggtggacctcgacaccgagcgtggctggaaagaaaggcggaaagcgcgtacgtgtgtgagatgctgctctgcgcggaggatgagagccaggcagttacggcgcgcgacgtaccgatgtactgcgagtccaagcgagagcagacgtcgggcacaaggtcagctctcgagctcaggctgaaaagaactgcactgtcagcgcaccttcttctcaaactctgtggcgagcgcgcaagtggggcagagccagcaaacgtcagcggccgagaaaacgagggcgtgcgcgcgcggtggcgggcagaaggcagcagctcgacggacctccagtcaggtggcgcttgacgaaggtggtcttgccagttcctccgtcgccgacgaggacgagcttgaaggtggggatcgaagcctgcagcagcgaggtcgagggacgaggtcgggaggcagcggcgcaggcaggcaaaagggagggagaggagagacgtcgtcacgccgtcagccgctgcgtccgaaggcgtctgcctagagagaccagagtcgggtacggtcagatctcgctgaacggacctcggccattttttcgagtgttttggggagtctgaaagagggggtctgagcagagggtgcggaagggggagaggagaggagaggcagaggcggcgtcgctctcgcagggagaatccggccgagcgagagagtcgcgacgactcgcacttgcaagtcggaccaccggcggcgcaaaagtcagccaggcgcgtcacgcctgacgcgtaacgcgcggtgtaaacgcccctccgtcgtgaagctcaaggccgcagaccctccttcgtcagggacgtgtagcggtagatcaaagacgtgacaggatgactgcagaggtttcgctggtgcttccagcagcttgtccctctcgctcgacaggcaggccgcctggcggttgttgtggctcgcgtcggctgctgcgcgcctctccggacccgctcgcttccctttcttcctgcgccaacggccctctcgccgactacccaggatccgcccctgctctctcactctcctgcccgtcgtgtctctgaccctgcgcgtgcctcgtctctagctgctggcagcctcctctaccctctacgtcccatcgtctcccgcagtacgtccttcgcccgccctgcttgttgggtgacaggcgctggacctaatgataccttcacccgcctccgccatggcttgcagccatccctccctcactcccttccgcaccagtctgcctctccctcgaactcctccacccgcaagctacttccagatgctcagcccgacactccctcgctcactactcagtctcgtcctcgcctcgctcgtcgtcacgacggccgtcgacggtcgcgagctcgataggtggcgcaagcccttccgcgtccctgatccgctcgtcggcaacgcagccggcaaccacagcccactcgatgtcggctcgcagcgaacaaacgcgctcgccgtcgctggcggcccgctcgtcaacgccgtcggcttcgacaaggtgcccgacacgctgcccgactgcctgcccaacacgatctcggccagcgagatgaacggcctgctcgcggcgaagggcgctggctttgtgctctcgctctgtccgtcgacaacgtaccagctcgagacgacgcttatgatgaccgccgccggccaggagatctcgacgctcggctacccgaccgacgacacgcgggcgatgctcgtcgtcgccggcagcaccgacctcgagaacggcatgtcgtgcgtctcgcttctcgtccaaggagacgcttgcgctagccgacagcgaccggcactgaccctccctgtctcccgtgtcgttcaggacgggcatctatgcggcctgcgcggcttgcagcgacatcaagctacggaacttccagatcgacggccagcgcggcccgctcgacccgatcaacaacggcggcctgatcgagatcggcggccaggtcgctggccagctggtcgagcacgtccggtcgttcgacccccgcggctggacgtgcctgcacattgccgagggcgcgctcgactgccgcaacgctacgatccgcttcaataacattggcccgtgcgggcacgacgcgccctttggcagctgggccgacggcatctcgatggcttgcgcgcagagcgtcgtcgagggcaacacggtcgtcgaccctactgacggcggcatcgttgtctttggcgccctcggctctcgaattagcaacaacacgatctcggtccacaactcaacctcgctcggcggcatcaacctcgttgtgcgtcccgccgccgatgagctcgtcttgcgacggcttgctgattctcgctcaaccccttgccgcaggatttcgcgccctggaacggctggtacaacgagaccatcgtccaggacaacgagatcattggcggatttgcctcggaagtcggcgacgacgagcatggcacctccagctccggcgccatcatcaagtgcgtcccggctttgttccgtcagctcttgcatcagaggctgacgccctccgttgtcttgcctggccgacaggatcggcatcggtatgggccctcgggtctggttcggcgccggttccgccgagctgcaaatcgcgaccggcggcaccgtacgcaacaaccgcttcagcggcgcctttggctgggcgatggcagtcgccaacgtcgaagacttcaccgtctctgacaacgagctcttcggcaacacgtcgttcataggcgagcgctcggtcaactgtactggcggagtcgagcaacagggaccgatcaccctcggcgtgccgttcgttgtacgtccgaccacacctggcctcctcatgctccattatctgacccgccttttcatcgatgcctatcccacaccaggtccaactcaacacgaccttctcgtcctcgctacaggacgactttacctcgggcaatgtcatcttcaacacgtgtctctcgccgcccgacaagtcgacgttcaagtatggccctcctcgttgataaattgcgtcgccgtagcttgctgaccgaaattcttcaacctgctctagctggccgtacggttcttctcctgcctcggtcgacgtcccggcttcgccctcggtcacctggccctccgactcgatgtcgacctccagctcgaccgcgtcttctgcagcagccgagacctcggcttccagctcgaccagcgtgagcacgggctattcaacggccgcatcgcgcttctctttaggcccggtgtcggggctaagcgcccttggctcgaccgtcgcaggcctagcagtgctgcttgttttctgatcgcctctcctttctgctcgtctttagatgtgcccttctcatagatgcctcacgagctttcgatctttcactgtatcttcccgcccttccgttagctggcctgatttcataagacgtcatcagacagctcgacgctgagagaccgactggccccacatggggcgcacgttcaaagcaaggtgaggggtcatgtcatgtagagacgtggcgtgcatgaggtgatgtggtgttgctagtacttggacaggagtgcaaaggtcaagcaaagatggagtctctaaggtgtaggtggtctaggatggaagcacaaggggagagaaaaggagataagaggaggcctaggcgcggatttcggcggaggtccgaggcgtgttgccgtagggcgtcgtcggggtcgcgacgcccgagtcgggcacgagctcggtctgcttgacctcgccagcccgctcgaccttggcctgctcggccaggcggaggttgcgcttgtccatgttgccggccgtcgtgtcgatcgtgttgaactcctcgcggtgctcggcggcccaagcggcagagcgccaggcggggatgtgggcgtggtagaggacgtcgatctggtcgacggagagacccttggactccgggacgagcaggtagacaaacgcaaatgagatggcgatcgcgccactgagagatgaaaaataagggccagtcaataaagcagtcgctcgacggcggaggcaagaaaatgtacgcacgcccagatgaggcagatgagcgaccggaggttggcgccatcggcgttcgtgatgagggggacgacgaacgagatgacggtgttgctgtgagtcgagagattgaggtcagcgttcagcggtaggcaaggagcttcggaagagctgaatggacgtacatgccccagttggaggcggtcgcaagcgtgacacacttgggcgcaagacgcgatgggaacgactcggcggcgacgacccaggcgagaggaccccaggtcgaggcgaaggcggcgatgaagacgcacgagaaggcgatgaggacctggccggcaaccttctcgccttcgttcgtgcggccgacgacaccgacaatgatttggccggtgaacatggcggcggcgccccaaaggagaacctcgcggcggccgaagcggtagacaatgtacatgccggggaacgtgcagacgaggttgacagtcgagaggataatctgggtgacgtaggggtctgagagacccgaagtccggaagaactggacaccgtacgagaagaagaactgtgggatgcggatgacggcgcaggtgagaagcgtcagtcggctgttatgcggccgcagcgcaaaggttctggcagacgtacattgataccggtcgtctgctggccgatctggatgacgcagccgataacggtacggagcaggatccggtccttcatgctgaagcactcgcggtacgaagcctcgccgagaaggtcctcctgggccttcttctcgaggacgagctcgtactcctcctggacgagcgggtcctcgacgtcgaggccgcggagacgagcgatggcggcgcggcactgttcaagccggcccttagaggcgaggaaaccgggcgactcgggcgagaaggcaaaaccggtcgcgaggaagaggccgaaagccagctggatagccaccggcacgcgccatgaggcggtgccggccttctggtgcatgcccttgttgacacagttggcgaggaagataccaagcgtgacgcaaccctggaacgagccagtgacgacgccgcgccacttgggaggggcagcctcggcttggaagacggggacgaggcccgagagggtgccgacaccgtagccggtaaggacgcggccggcgacgagctggccgtactcggtgctggccgagacctcgatggcgataccggcaaggaagaggatgagtgaaatcaggttagtggtccgaaggccgagcttgccactgcaaggttaaaactcagtcagcgggtcacagtggcgacagcgtgaatcgagctccacgtacgaaatccagcccgacgagagggcgccgacgaagcagccgacggagaagataccggtgatgacactgaagagccagattgacaggagcgtcagcgagcggtcgcttttgagtgagaggatgggtggcgacgcacgactggcgggacgagctgatttcgcagacgccggcggcgtcacacgtgccgaagcggcgctggaagtcgtccatgatcatgagaccagagatgaccgactgctcccatccgaagagaaggccggcgagctgcagagaggtaagactcagcaagagacagcgagtgaaaaggcaggctcagcagatttggcggacgcaccgactggaagaagcagaggatgagggtgacgttcttggccatcgtgggcgaccctttgcagctcgatggagggagcgcgaggaaggaggaagggagaagaggaggaaggagggcgggtttagtgggtcgagggtgagaaaagggaagagctttctccgccccccctccgacggccgtttgcttttgaaggcctcccggggaacggggcggcacgaagccatggcccaaggggaaacgggggaggggcgctgcggaggcgaaggggagcccagcgaggcctgttgccgcagcagaatttggaggtggcggcagttgctcctgccactgccgccggctcggggtgctagaggcggccggccggagttagccgaggggcaacggtttgcggggcgagaggggctggcctgaaacgcggcggctccgctgctgcccagagtttcgcccagcgcgcgcggcggaggcgggggccagcgaagcgagcaaaagagctcccgtcggttggccggtcgggcaaagtcgcaacaggacgtcggcctcgctgacagcagccagcagcagcacgcccgccggctgagcgagcccagaacctctatcgtcgagagctctcatcgggcgcttgccgccgaccagccgacagggctcgtgtcggctcgcgcggctcgaccgcctgatctctgcgtaagagctcgtcaccaccatcggccgccgcgaccatcgcgcgggacttcgacgaaggtcacaagcctttgctaagaccgctgcgcgacgcccagtcgacctctatcactcaggccggcctggctgccgtgtcggagcgagtgaggaaggatgaatacagtcggacgcgaggacggcccgttgcgaacggtctgctcgttgcaggtgtcgagagaagcggccgatcagggaaagtacgtcggccagaccttctcgtacacggccttgtccttgtccgagaagacgcagaagatgaccttctcgagctagatcggtggcagagagcgttgaattggtcaggacccctcgcccggaaggagggaaaagttccaaacgacgcaccgtcttgacctgggcgagaaactccttgacggcgccgagtgcgacgtgcgtggcgtcctcgatcgggtagccgtctgtactcacacggaaagggaaggctcgtcatcagcggcagggtcttcgacgtccgaggagggagactgacagatgccagtcgagatcgagcagaaggcctgacagagcggcagagcgaggtgagagcaagccaggtcagcctgactcgtccgttgaggaagaaggcccgggtgacggcaagacgtacgatgctcttccagccctccttcgccgtctcttcaaggcagcgcatgtagcagctgcggaggagacgctcactctcggcacggtcaccgcgcgagtagatcggcccggcggtgtgtgcgacgcgacgagccgggagctgcacacgagggcgagaaagggcaaaatgtcagcagtgggggtctggcaccaacgagaggaggaaggcgcgccttgtacgcgtcggtcagcttgcagttgcccgtctcgcagccgccgagcgtccggcactccttgagaaggttgggtccggccgcggaatggatcgcgccgtcgacaccgccgccgcccactgtcaaacgagatcacctcgaggtcagcctgcaactcgcccgaagcagggcgtcggaggcggtcagcccgccggcgcaaaggagagacgcacgcaagctcctgtttgcagcgttgacgatcacgtcctgtcaaatcaagaagcgtcgtacgtgtcgtctcagtcagagccctcgagatggggccgtcgaacggcgtcggaatgcgagaggcagcgggtgacaaggaggcaaggtggcgtgggctgctgcgggcttgcgcgagccggccaaggtggacgtcatcgacaggccgcggcgttcggcgaggtcgacagcccaccaggctgcccaggagcgctgcaagtgagagtaggaggacaggacggacgacagtgagcctggtgatgtcgcccttgagcagcgagacggccatggctggcaagaggggagtgatggttgtgggtcgggccgtccaggatcgaacgaggccggagacggccaacgagcgctggagccgacggccgggaggaagctccaggaaatgaagcgtcgacacccatccccgaccacttccacacacagcgagcagcgcatcgacagcacgctagactctcgcccagcaaagacccatcgacgagccccagtgcgacaacgaacgtcttcgctcccttcgaagctgcagcagcagggcgcagcacagagctcccccccttgccccgcagcccctcctcccatatccccctccttgtccgcctcgcaaccttcagagacggcggctacctcccaggcggcccttcaaccgtccggtggtcctacatcttcctcgtcctagcccatacgcttgaagcactttggttcgcccggaaactcctccgcgagcgcgccgtggcggcgaaggacgtccgcaaatgggtgctttggacgctcgccgtaggcctcgcgcccatgcagccgcactattctcgctcgctcgcgcgcgagcgcgtcagattgctctacgcgcgcgcggcggagagggggctaaggcttgggcctcctaaggggcaagagcagctggtcgagggcgagggcaggaagacgcgctagggctctctctggatggatgttttcgctttttgcccttgcagctggccagagacacgtcgcgacaggtcgatcgcagcagcggtagacgagggggggggggctggacggcattttcgatcctaggatggggacgcgcgcagtgcacggccttgcaatctccttgggcaggaatcgcaagccgagagagagagaacgagacggcccggccgtcggcgacgagggaccggactacgagcggccgaggatgcgcgagagcggttggtgtctgcgtgcgagtcggacggcgcggggtgcgagagcggttccgtcggatcgttcgtgcgcccaatgggcgagtgtgtcgttccagagcaagttgaggtagacgtatgacagtgtgtcgaaggagaaggagaggcgggggggttggcgtgtgtgtcggctgggacattttccctcagccggccgccgcctgttggccgagctccgccatgtcccttatgagctcgtcgaacgggatcgcgtaccggtccgcgatctcacggagtttgcgctccgtcatctctgctgctgctgctgccgcgtcgcttgccatcagcggcggcggcggctctccgccgttggtcgtgctgctgctcccggcagcggtagcggcggaggggatgtcgctgcctcccgccgccggctgctgctgttgctgctgcggaccgagtgagatccgatgcgagataaccttctcgtacgtgtactccttcaagccctgagcgagcagctcggcgtgcgtcgggtggtggagcggctcgacgaccgccggcagcgggcggttgacgagcgaagggggcgcagcaccaccggcatcggtgatgatggagagcgaaggcgggagccgacggggggcgaatggccggagggtgatgaggaggaggaagaggacagagacgagcgcggcgagcgcgactgagcatagtcggataagaaccctcgtcagcctgggtagcacgagacgcagagcaggcagggagggactgggcgcgcacgagtaacgttccgcggcagctggacgctcggcaccgaccatccgccgccgggggcgaagccagacttgaacgggatgccatccggctcgtcttcgagcttgccgacccgtctcctcgccggccttcgagcagctaccttcattgtctccttgtccggcgagctcggccccgcagcgacagcggtggcagcgagcatatcggccttggacggtcggccgacccgtcgcttcgggaccgcaggagagcgctcgacctcgtccgagcagccaggcttgatgtcgggcaggcgggtcgagcgtaagcgcattggcgtcggcatcgtgcgagagaaggaagtgacccaaggtgttgaggggcgggagcagggaggagagggtcgtggtcggcgggaggaggaggcgggtcgacgcgccgccgcgcagcgcagtgtgcagcgcagcgcgacctagcgcgagaccagaacgcgggaaggacgactcgtcgcgtctgcacttgctcaacggccgatttaagaggtccagggtccgagcgagcggaaggtgatgggcaggcatagggcttaggatgtgtgcgctgctcataggcgggcgaaggctctgagcctcgatcctcagacccgaagacccgaaggtgcgcagcgcatagttgtgacttccgacaacaggccggtcggtgcgaaaggaagctggagagcggcgtgcatcgcctcaacctcccagtcgatgacaaccgtataaaaggaagagtcgactcacgacagaggacgtcaggttcggacagtaacccgtcaagacggcggcccctcgcctcctgccttccgcttttcggcccaaagccgcgccttctcccgtcgaagccgccgcttctcctcctcctgcgcttcgtctgctgtcggtgtagccgtggcgtcgactgccattcctgcgtcgggtgtatcggtgggtggagcggccatcggcttcgcttcgtcggctgcgtcttgccctccctctccctcctcgtcctcgtcctcgctactctcgtagcctccaagaagcgaacccatcgcgtccgccttcggcgccgggttcttgaccccccgccacgccctggcgtaccggcccttgaggaagtcgaagcgccggtcggcgccgtggtgggcgaggatacgcatctcgagcagcgccgggttgggcgaggccgagagcgagacgaaggtgtgcttcatgagggccaggattgcgtctggtggctgtacagggcggtgcgattgtctaaaatgagtgtcaacgggcctactcaggaggagagcgaaggcaggcgcactgtctcgtcgtcatcgccccactcgtcggcatcaacctcggcaggccctggctcctcgatcggctcgagctgctccatccgcctcgcccggagctcgtccagccgccggcgcttcttgtgccgctcgtaatcgtcgccttcatcgtctgaaaagaagaaggtgtcctcggcgtctgagggcagggacgaccagctgctggctggtgaggtcgggcgagacgtagcggagctggccgaggggagggaggtgaggaggtgcaggtgcgagaacctgtcgcatgaaggaggaggcggatagggtcagcatctgttgaggtggacgcagtcgagggaagggagcaaggctgcggagggctcgtcgtctagcgtgcttgacgggttagcaggttgacctcgtagtgaccttggcagcaatcatcgcctctgcagatcccatcttccgagcttggagcagctccattcggtcagctgcagaaacaaggactgaccggtcgacccaaaggcccgtgtcgtcgccgtcgtcgtcgtgaccgcctgtcgccgaggcaacagcgcaccgaacgagcctcccttgcttcgcttcgccctctccgcgcctttgctcgagctgcagtgagagctccggctgacctctgacgaggtctgcctcgtaggccgtgacgacgaagcggtcgagccggccggggtcgtccggtgaaggcgagcgacgccgaccagcgaaggcaccggccgggccagagctgctgggtccggcgaccggcggacgataaacgggaaaagggttgactccggctgaggtgctcggctgctgctgctgctgctgctggaaggagcgctgctggcggggaggcatcctcttgtaggcctttcgacgaaggctgttggcgggtcggtcgcagggcttgacctcgtgcagctgcgcgctctgcttcccttcccttgacggtcatctcgatagcggcggcttctcgtccggccagcattgtaagacgcagccttgcacggctcaaaaggaagctgacgacaacgagaacataactgatacctccgtgtcgctcgtggctctgagcagactcctgttggcaccgcaccgagcgatgcccgcttcgtccgcagcgttgccggtcgacctcgctctgctttcgaaccctccgttgccagtcgagctctggctcgccatattttccggcttctcgtatttcgagctacagcgagctcgggccgttaaccagagtttcaatcgctggatccttagcggccagttcgatctcgagctcttccggacgccgcccgtcgcctccagggacgccttcctccgcctgctcaagggcaggccaaaaccacgcctcgtcctgcacccgttcttccgacatctcgatcttgcagggccgtccttctcggactggcgcatccggcctggccagtcgtacggcggccatcgtaacggcgacgtcgcgtctcgggccgggcgacgatccgtccccctcgccgactgcctcgccgccttgggggagaacgcgacctatccgcccgtcctttcgctggcctcgctcgccatggaccttccagagtcccgggcctacacgcatgtcgcagagaaggacccgagccggccagtgacggtcgagcgcgtccttcggacgctcggccgcatcctcgaggagcggatctatctcccgggcgagatcgagcggcaccagctgccctgggtccaggcgtacgagcgttcgtcgggcaagatctcgtggcggggcgagtacacgaagccgtggtggatcatggtcgaggcgttcgagccgtgggagggtcggttcgttgcgacggtcgacaagcgcacaggagacgtctcgctcatcgccagcggcttccggcgtgcgtctcacgctatctcctctgcagcacacgatcactgacgattcgcttgtacaaccgctcgacagtccagcgcgacccggacgacgactactggcggaggtaggcagggcgcacttcttgcttcttctgttgctagcgcgtcgccctcctattgtgcgtgtgccccgccttcgacagcttgtcttgcccgtctctgtcgtccttacgaaagtgccgggccttgctggtacgaccgtacatgaatacttgcgctgatttcatctagaactggtgccgatggaaaacgtcagcagggtggcctccacttgtcggccatcgcaagtcgccgggcgcgccgccgccgccatcgtcgttgccgcctcctctcctccgcaccaccactcttctcccaaccaccaaccctcttcaaaaccggtagccaactcgccagtctctttaaagactcttctgtatacccccaacctccctttgccgttcaagccgcctccccgcgccccccttttgcccaccacgggttccgttctttcaacccgccagcccctcagccccgccgccatgtccgccatcaagcagaccgtcgaccagaccatcaaggacagcggcatcgtcgtctggtcgaaatcaacttgtccctattgctcccgggccaagtcgctcctcaagagcctcacgctgcctgccggtgtcgagatcaaggtcatcgagtgagttcgccgctgcctggccgctgcagccttgcgccttttcgctcgcccttgctgacgaagccacctatccgttcactaccaggatcaaccagatggacgagggcgctgagatccaaaactaccttgccgagaagacgtgcgtcgattgccttctgcccagcgctccggccctgcagctgacaccccccatcccccgactgttccggaaccagtggccagcgcactgttcccaacatcttcatccggggccaggtgcgtcgcctagatttacagtcaagcatgtactttcagcctttgctgacgtttgctttgcctgagtagcacgtcggcggctccgacgacctcgccgcggcccactcgtcgggcaagctcgccaagctcatccagggctaaagttgacgccgttgcggcctcctgctagtacgctgctgccggcctcagatcccatgctgtatccaccacccgctcgcgaggagagagactgttggagctttgaagtgcgcgactgtcaagggcatccctcagccagcgcgcagcagcagctgtctcagggcacattctatccgctgccctcgcttgcgctgtgcgagctctcacggtggccccaaggctggtacgatcggactctgagggcagaagacaagaagccgggtcagcgtcaagcgtcgccgaggctgcaagctcaaaggagaaagcgaccgacttcgaaaagtagaaggggccctggttgagcagcttgatcgggagctcctcgcccgtcgccttgttgatcgaaaagtagtcgatcagggtgagcttgttccatctgcagaaggagcggacgcgggtcagagtccgtggaagacgttcagaggagcggacgaccgaccttccacggctcgtgctgccgagcccgaggaccatctcaaagtcgtacttgcgacccttggacttggccgccgcccggcgtctcgcctcacgggggtgcagcttaaggtcaaacgccgggtcctcgagcggctcggggtcgccaaggtcggtgacgtcgatgagagcctgctgctcggggttgtcggaagacgaccgctcggccatcgtccaccggccgtgatgcaggcctttcatccgcaacgtcggcgtcagaagtgggacgaggaccgaggggctaaggcggttgaatagaggggtcgatgtcagcagatgaagtcgacaaagacttgagaagaaagacgaaggccgcactgctcggtcgaaagcagcgagagcatcgtcccgtcggcgaggaagcggatgaggcggtgataggtgactgcgagggacggatcggtcaggtcgagcatcgagaggccgccaggaaaatcgggacaaactcatgtgcaccgggtcgttccagagcgtctctgaagcgccgacgcggacgtctatcagacggagcggggagagcagaggtcagctttacagaatcgatcgaccagaggaggttcgggcccgacagtgcacaaccgagatatagaggccgtccacgcgcactcgcggcagtcgcaggagcatgtcgcgatggtcgcctccgaacgatttgacagcggcagccgtcctatagtctggagaaacgatgaaaggcggctgataggcaagctcgcagagatgcctgggggagaaagtgcaaagtcgaagcattcagcgctggactggctttgctgtcatattgcaagatcggcgcgcacttccacacgccctgctcgaccgaaagcaggaacgccttcttgcaggtctgcgcgaagcggccgatgccggccatgtcgccgagctcgccgagcttgccgaggacgacgacgagcacctcgtctgggatgcctgcgagcggcgccggctcattctcctccgctggctcgaagtgggcgccgccctcggcgaggatggcggcgtgaagctcggcaccgccgtggatgagcgacgagcggtgcggcgtgtcggatgctgcgagcgaaggctctgcaaagttgtagtcgggcccgatgtggtactggcgctggaagcgaaagtcaaggtcgtcgacggctgcgtcactggccggatcggtcgtcgccggcccatcgtgacgggtgacacccttaggaccgccgtgcagacgctggtaggctctgtcgacctgatcgtcgagcctgaaagccttcgagtacaggttgaccgcgagcgagagctgatgggcgtgctcggcctcgatgccggccgcgtagtacgtcagcgccgcatcgagcccttcctctggcgtcggcggcgttggcgcaagtgcaagtggcctgtacggcggatggccaggcgggcggactgcgggcaggtcggccgctgcgctcctgggcgagcgtacggagggcagcgacgacgtcgtgctctcgggcgaggcaccgggcgagccggccaggtccgacttcgacgagcgcggcgacgtcggcccctcccgccaggccctttcgggagaccgagcaacgcccgacgggcgccgacgagctgcaggaggaggcgacttggcagcggctgcgggctcgccaggacctgcgtgcgatggtgggccgatcgacggtcgcccgagcggcatcgtaccagcgaccgatcgggtgccaccggtacgagctaccgaaacctcagcttgccactgcctgagagtcagaggcagaggtcagtaggagagtatgaggccaggcagtggtgtgacagacgaaccttctgaagacctccagctcctcttccggtatcggctcggacattgggaggcgagagggagttgagagggagtcgtggtacggagagcagggacgaagtggaggcaggacgagggtccgtctcggccgacccccgactgccatcccgccttctgcctcctcctcctcctctcctaatagtctttctctgactttctcaaaccggcgcgctagatgggacgcaagcactcgcgcaactcgcgtacgtcgatgggcttggcgccttgtgctcgccggccgggtcgccagctactttccgaccagcttgctgatccgccgtcctcgcaacctggcctcgtggcagattcgagtccctttttcagccatcacgagaagaatgcgctgagctatggctctaagaagcagcggctcggtgccgagtcgtaccgcaagtttgacgcctgcatgctgtgtagtgagtgtcgctgagggctggctggcgcgtgcactgtagagctcgagcgctgaccagcttgcaccccccctgccgccgctcgtcgtccagactcgacggtccggtcgccctgcgcctgtccggacggtcacatctactgcagggtgcgtctctggcgctcagatcgtatcctgccctattattgctgacgaccgctggcactcatcgtctctgacccggcgcgcaggagtgcatcctcgaggccatcctaacgcagaagaagctcatcaaggctcacgagctcgccgtcgcccgccggggagaggaggagaaggccgagcaggagaaggccaggcaggaggcccgagagcgggtgctcgccgactttgagaagtcgcagaatgggctcggcgcgcggaagtcaaaggcaggctcatcgtcgacgacgactgcagagagcccggccgagcggaaggaatctgaggaggctggaggtgcgagcatctgtccgcgcatgcttcgctggctctatctgctgacggcctctcctatccgcaatcagagcgcggccagaagcgcaagtttgagttcgacatgagcgagctcgacgaaatggcagccgccgccgaggacgcagccctcgccgagatcgagaaggagcaggagctcaagcgcaagaaccgcaagctgccgtccttctggcttccgtccctgacgccgcaggccgggcccgccaaggtcaaggaggtcaagctcgagaccatgtgccaggcatcggagcacccgcacccgctcaagtcggttctgcctctgctcttttaacgcatcatgacactgacatgtgactgacctcgaccacaggctcaagaacctcattgacgtcaagtttacgcccctgccgttgagcgccgactcaacgacggctggaagctcgaacccgacggcgtcgatgtgcccgagctgctcgaaggagctcaccaactctgccgtctcggtcctgatcaaggtcggtctgcctgttgttcttgcatcatgcggagcttctgctgaccaggcctctaacttcccgttttgccaggtctgcggccacgttgtctgcaagacgtgcgtcgacaagattgtcaagccgggcaagcagtgcgtcgcgtgtgacgcgacagtcaaggacaaggacgttgtcgagctgcagcgggacggcaccggctacgctgccgccggcaatgccgaggccgtaaaggtgcgtcggattgatggaccgggcgaaccgctccccttcgctgcaactgacgaacgtcctcctcgtccgcccgctgttcttgacaggctggaaccgcattccagtagagagcacgacctgacatcccgtctctctgtcaaaggactcgcgccctcttgcgtcggccggctgcgggggacagtttccggtcgcttttcgggcccgccgccgggcgaggcgccgctggagggacgcggccgccggccaacaaacaacgagagtctgtccgcgcccgcccaactctttctcgctgccggcgcgcgcagcgaccttctcttcccccctgccgcgagacgtttcgcccgccgcgggtcgcgcccttcgatgcgtgttgtacgaaagagctccccatgaagtacccatgtctacgccgtcttccgttgccaggcgagtcgtcgtgcctcgagtgtttgcgatcgggctcgcaagcccggggggagaaggccgcctccgtcgcgcggcgcgcccgcgccgcccgcgcagggtgggcaggagagctagcccagccctcgtccctccgaccgcccctctctcgccctctcgtccgtcattcctgtctggacagctcttgccttcgcccagcacagctctctgcgtaccgcctgcgagccttccctcccggctcccgcccgccaacgctgccggcctcgcctccgctcgcttccggtgacaggcccgacttcaaatccggctcgccctccgcgcgtctcgccattcccctccgccgatcctgcttgtctcgacctgcgcaaggctctcatcttttctcggtggaataaggtcgcatccttcttgatcgcatctacttcttcgtcgcttttctcgcctctcggatcggtctggtgcgtcgccggcaacgagactgctcgaccgtcgcgcggcctcggctgatctcccgactgcctttgaccctcgccggctcgaccagctcgccggcctttcgtgagctccatcgtctgctcttacggtcagcagggaagctgattatcctcgttcgctgctcagcacgaacctcccgacctccgcttcacgacctttgagcgatgatggcctcgctcggagggctccgaagcgacggcgcgccggtagcatctctcctgccgtcggccggccggcctgctccgggcgacaacggagcggccttccaggaccacatcctacttgtcctctcgagtctgtcggccgccgtctcgccttcggccagtctctcggcaccgctgttggcgacaccggtcccggtcgtccctgcctttcaggggccgggcgcgtcctccaagactgaggcgattctcggcgagctccagctgctggcactgcggctgcacgactctgagcagcgcgagcgcgtcgctcaggccaagctcgttgccgcgctgagctcgctcccgaacggcgcggcgctgaggaacggcgagggcgtcctcctgacgccggacgcaacgccgccgctcgtgatgggcggcgacgactcggccgcgcgccagcagtcggtgtcgaaccggctcaagtcgtcgccgacctatccgcttcaggcgccgccctttagcacgtcggccagcggcggctcgatcctcacgtcaggcaacatcagcctctacgagagcggcctgggcccaaccgaggagctccggctcctccgcgcgcaggtgcaggatatcgcgcgcgtctgcaaggtccgtccggatccggctcctgcctagcactctgtcctatcaagactgacagatccgcttcgtgactctacaaaactcttcaggctgtgagtagctcagaaaaggtaccggtccgtcgggtggagggcgcaagatgctgacgagagacgcctgcgcactttgcttcgttgcctccaggtcgccgccggagacctgacgcagaagatcatcgtccccgtcgagggcgtcgtcatgattgagctcaaagatatcataaacacaatgtgcgtctcccgtttgcggccgaggtcgtgtgcgctccaattagctgacgctgctgcgcgccggcttgcttataaacagggtcgaccacctctcgctttttgccggcgaggtcgagcgggtcagtctggaagtcggcaccgagggcaagctgggcggtcaggtgcgtttctcgctgctcgctcgcttccaagacgctcttcctagctgacctgcgcgcctcgcaccctgtccccaggccgtcgttgagggcgttcagggcacttggcgtgaccttaccgctgtcgtcaatgtgagcacgagtgcggttcaccagctcgtgcgcggaaactgacgacctcactctatgcgacagaaactcgccgcaaacttgacgagccaggtccgggccatcgccaaggtgaccaaggctgtcgcggttggcgacctgtcgcagacgatcgacgtcgaggccaagggcgagattctcgaactaaaggtcacagtcaacgacatggtgctgcagctgcggacgctcgccgacgaggtttcgagagtctcgctcgaggtcggctcgcaaggcaagctcggaggccaagcggtcgtcgaaggcgtcgagggcgtctggaaggagatgacgcagaacgtgagtgtcgccggctctatcctgagctggctgatttctgacacgccttcctcgctgccaacttcaggtcaaccagatgtgtatgaacctgacggaccaggtccggtcgattgcggccgtgacaacggctgtcgccagggtgagtcgctcgtccaccgaccgcgcggttgctccgcctgctaaagtcatgttctggcgactcgcagggcaacctcaatctgacgatcgacatcaaggtcgaaggcgagatggcgacactcaaggagacggtcaactcggtgagactgggccggctcatcacaagcaggcaggcggtcgtaggcgcagagagctgactgccgcccattgcttggcctcccgccagatggtcgcgcaactaacgacctttgccagggaggtcacccgagttgcgctcgaggtcggcacgtacggccagctcggcggccaggctgtcgtcgagggcgtcgagggaacctgggcagacctgacgactaacgtcaacgtgcgtcgcgtgcctgctcgctcgctcgcggacccgagtcttgacctgacttccatcccatcctctgcagaaaatggcggccaacctgacgaaccaggtccgagagatcgctcacgttgtacgcctgcccgctcagctcgtggctgctaaaggaggactgctgacgctcttctcgcttgctcaaaagacgaaatccgttgctcgcggcaacctttcgaatagcgtcacggtcgacgtccagggcgagatgcttgacctcaaggttactggtacgtccctgcagctggcacctgtcgaatcagcaagcagctcactgacgcttccgatcgcagtcaacgagatggtccagcagctcacgacgctcgccaacgaggtcacgcgcgtgtcgctcgaggtcggcaccgagggcaagctcggcgggcaggtgagctgccaactgcgactcgtgtcgatattcgctgcctcccgttgaccttgtcccgcactctcttcaggcgatggtcatgaatgtcgagggcgtgtggaaagacctgaccgacaacgtcaacttgatggcgtcaaatctgacgactcaagttcgctcgatcgccgtcgtgtgcgtgccatctgcctccctccttgcctccagaggtgctgatgctttgcgactgtcccctgccagcacaactgccgtcgctcggggcgacctttccaagacgatcgacgtcaatgctcagggagagattttgcagctgaaggacaccgtcaacaacatggtctcgtccctgaacgacttctcgtccgaagtcacccgcgtcgccaaggaggtcggcacctttggcgagcttggcggtcaagccgtcgtcgagaacgtcgaaggtgtctggaaggacctcacggacaacgtcaacctcatggcctcgaacctgaccacccaggtccggtcgatcgctgtcgtcacgactgccgttgcccgaggcgacctctcgcagacgatcgacgtcgacgcgcaaggcgagattctccagctcaaggacaccgtcaacgacatggtcaactcgctcaacaacttttcctccgaggtgacgcgcgtcgccaaagaggtcggcacgtacggcagcctcggcgggcaggcgctcgtcatgaacgtcgagggcgtctggaaggaccttaccgacaatgtcaacctgatggcgtccaacctgacgacgcaggtgcgctcgatcgcggtcgtcaccacggccgttgcgcgcggtgatctgtcaaagacgatcgacgtcgacgctcagggcgagattctccagctcaaggtgcgtcgcccgcctacctgccaggccatcagcatgctcgctcaccttttttcacttgacctttgcaggacacggtcaacgacatggtcaactcgctcaacaacttctcgtccgaggtctcgcgcgtcgcaaaagaggtcgggacctatggccagctcggtggccaggcccaggtcgacggcgtcagcggcgtctggaaggacttgacggacaatgtcaacgtgatggccgccaacctgacggttcaggtccggacgatcgctcatgcgacgacggccgtcgcccggggcgacctgaccaagaaggtgctcgatgttgccgtccaaggcgagattcttgacctcgtcaacacgatcaacggcatgatcgactcgctcgccatctttgcctccgaagtcatctttgtcgcccgccaggttggcaccgagggcaagctcggagtccaggccaaggtccagaacgtcgagggcacctggcaggagatcacgttcgtcgaccccacttgtctccaagtctacgcttgtcgctgaccccttccagctcctcccatgcgccgccaggtcaaacgtcaacacgatggctcaaaacctgacgtcgcaggtccgggcctttgcgcagattgcggcgacggcgaccgagggcgagtacaccgagtttatcactgtcgaggcgagcggcgagatggactcgctgaagtcgaccatcaaccagatggtctttaacctgcgcgagagcatccgcaacaatacatctgcgcggatcgcggccgagctcgcaaaccggtcaaagtccgagttcctggcaaacatgtcgcacgagatccggacgccgatgaacggcatcatcggcatgacggtcctgacgctcgagagcgagctcacgcgccagcagcgcgagaacctcatgatcgtctcgacgctggcgacctcgctgctgaccatcatcgacgacattctcgacatctcaaagagtgcgtcccagccggctccttctctgaccctttcgacctgagccgaaaagaccaccttttcctgcccttccagtcgaggccggccgcatgacgatggaggagacgcccttctcgcttcgcgcctcggtcttttcggtcctcaagacgctttgcgtcaaggtgcgttgctcgcctggctctctcgcgcgtgcaccgctgacaggccatggtttgctggctccgctaccccaggccgcccagaacaagctcgacctcatctacgacgtcgatcctcgcattccggaccatctcatcggtgaccccttccggttgaagcagatcatcacgaacctcgtcggcaacgccgtcaaggtgcggctgcgcccgattgacgacaggcccgcaacatgctgacgctctcgcgtatctcccacctgtctctccagtttacctctcagggccaggtcgcgctgactgctcgtctcgtcgatgtcgaggacggcatcgccgaggtcgtcttctgcgtcgccgacaccggcatcggcatcaagcccgacaagctcgaccttatctttgacacgtttgcgcaggcggacggctcgacgacgagggtcagtcacctctggttcgctcaatgcctgctgcgagctgactctgctctcgccatgcagaaatacggcggaactggcctcggcctgtcgatctctcgcaagctcgtcgcgctgatgaacggccggctctgggtcaacagcgacgtgcgcccattttgcctcttgccgctctgacgagcgaccgctgacgctcacacctcgatccgtccctttctcacgtagtacggccgcgggtcccagttctttttcgtgcgtgcgctcccggccccgctgcgcgataccccgctgacgctccctttctctcgctcgccgacagacgacgaaagctgaggtcaccgagatgcctgcgggtgcggtcatggacaaaatggctccgtgagtctgctgccggtcacggcccgcgccaggcagagaaactgacgcgctcgagccgtcgtttgcagctttgctggccgatcggtcctctttgtcgacacgctcggcgacacgaccaacatcccgcaggtgattgagcagctccatctcaagccgatcgtcattcccaacgtcgaggccgtctggtcgacgcccaagtcggccgacaccaagctgcctttcgacactgtcattgtcgacaacctgaaggacgtgcgttagctcctcttgcgtcgcaacggcctcagaccttgtcagctgagctgacttgttgcgctcgacccacaggccgagaagctgcgcgagattgagcacctgcgctacatcccgatcgtcctgctcgctccagtacgttcattgcctacaatcgtgagtgtaaatggagggtgacgcgtgctgacccgctttcgccgcagacggtcaaatccaaagacccacttccacccttcatccacctgacggataaccgccgacgactgctcaacctggcgacgtctgcggacgaggtccttccgcccatcccggtcaagagctgccttgacatgggcgtcacctcgtactgcacgacgccgacgtcgcttcaggagctgtttgtcaaccgcttccttgcgtcaacgtctttgcgcgacagctgctgacgggcctccgattccatccagctccggagcgctcctgccggccctcgaatcgcatacggcgctgcccaccgaccagtcaaaggaggtccagctcgacatcctccttgccgaggacaacaaggtcaaccagaagcttgcggtccgcctgctcgaaaactgcggccactcggtcgagattgccgacaacggtcagatcgcggtcgacctgttcaaggcgcggaacaaggccggccatccgtacgacatcatcctggtgcgtctctcccgccaggatcaccgcacttcctccagccagctgacactcgagcctcgcgatcgtccgcagatggacgtctcgatgccgatcatgggcggcaccgaggcgacccgcctgatccgcgagaccgaggagagcgagcgtcggccgcggataccgatcgtcgccctcacggcccatgcgatgctgggcgaccgtgagaagtgtctcgaggcgggcatggtacgtttagtcgaccgtgttgacgctaacgcaggagacgtcgtgtggctgaccgattgcttctcctcgccgctcgctaggacgagtacgtcaccaagcctcgtacgtccctttcgcgctcgagacatcctagctccaagggctgcgcgctgatccgccccgcctttctctcgcacagtcaaacggaacgacctgctcgctacggtcgcaaaggtcatgacctcgagtcaacgcatcaccgagatcaagtagcagaggaccggccggccgttcctcctctacatcgtttgaaacctccggcgctccgtcgcccttaacgcccccaacgtcacgtctcacgaccacctctctctattgggccctcattcccacggtcccgtcttgtacttctaccttcgttcgtcgcttcgcgctgctccccccaacccgatctgtgcctgctgctcgccccgttcgcgccctcgctagggcgttcgaccctgacctctcctttgtacaactgcccggatgactatgccggctcgtcgtcagacgtgcgctgtcgatgacaggaaatctagatttctatcagaaggacgacgtctagggccagagccggtgaagcgcttcacagccgctctcgagcagcggccacaagctcgggaacagcggcccagaagcggcggcgcacgtatccttggtgcggaagagctcgaggatggctgctcgaacgaggagcgcagcggatcagcgggctgggcaccagaccaagcggtgatgcgcggacgcaccaaagaagttgaagcagatggcggcaacgatcgagccgtgccagatctgatgcgaggcgccgaagtagtcgaacgcgcccggccagcgccgctcggggaagtgctcggcgtagactgcgcgggcagggcaggtcacagtcagctcaagaccccgccagcgagcgagaatcagcaggccgactcacagctcaagccgaagatgtaagagaggagcatcggagcgagcggcttcgcaaaatgggctgcctccgagaggcccttctggaaggagagttgcgcgaggggcccgacggctgagcctgccatgcagacgaagaagaggatacgccaaccctgaatagaggcagagcatgccgtcagctgctgcgagacgtacttgtgggctgaacaaagccgaaccttgttctgtcgctcattgaaccacgacatgaagggaagcgtggagccggcgacctgcaactcgcgtgaaagctgcccgtcagagactagatcagatccggagagaagaagctcacgcaccgccacaccgagattgagagccgtgtagaggatgagcgacgtcggctggcagtagaaggcaaagtactgaagggaggagagcggatgcgtcagcttaaagatggagagttggagcgctcccggacgagagcgtaccacaaacgcgttcacacttgcggcgatgagccaggcgatgccgaggtagtcctgaagcaggagcaaagcaagggtgagtaggtctgctggtcgataaatcgcaaggcggcgcagaggggcgtacgacgcaggcaaaggtgatgaagtacttcttggtcgcgcagccggcgaacaggtgccagagcgacgagcagaagaggcactggaagggcgctcgttgtcagcccgaaagccgagcaagaccgttgatcacaattgaacgaaccttgaaggcggcgagcaggaacgagcagaggatgagcgagtccatcgtcgagggcccctcttgaccggcagcaggcacaaagggcgaggcgtaaaggaaaaaggggatcgaggaaaagacgacgatggccgagatgaagtgcgagtggatgttgactgtgaggtgcatgagacggaagcgtgagtgctcacgtcgtctaggcacgtctgacgacgccactcacctgtctcattgtgcaggcaaaagagcgagcccagcagctttggccactcttggacggtaatgaagctgcgagcgtcgacgatccaggccgtcagcgcggacacacagcgcttcaggacgagcgacgacaaagccgcaccgataccctttgacgacgtattcgttattctgccagagtgtcggcaggtcgtcgtattcaatgaggccgccgggtgccgcctgcgctttacggagcgcgtcctcgacagttggcgccctctgctcgatcaccttgaggacgacctcctcgtcgccgctcgactcttcgccgccgccctcgcgccgcgccttcgcccgccgctccgtcatgagtacgcgctcgaacgccgggtgacgtcgcggcgtccgattcgggaagacaggaaagccgccgagccggccgaggccagagtcggcgccttcggtcgccttttccggtacgtcgggcaggatcgagtcgagcagagcgagaatctgctgcgagcccatcccgagcggcgacgtcggatgaagactaaggtcggggagcttgcctttgaacgacgtcgagcgcggcatgcgcgggagcgagacgtgtacctggtgcaggcgcgagggcaggccggcgaggaagttctcgagcggctcgcgcaccggcgggaggctcgccgcctgcaggttggccatcgacggcaagcgcgggaggtgcgtcgcaatgtcctcgcgcaggtttgaaatgagtgacaggaggtgctctggcgtgagcgagtggagcgatgccgtcgacgacgaccggtcgtgctgaggcggaggaccgggtgagtcggccgacgtcgccggaccggtcgtcgcagcaggcgctgctgcggttcctgcgccttcggccttgccgtcgtcacctcggtcggtctttgcgtcgggtgcatgacgggcgtccgaggtgaggccgtcgagcgtcgacgagctcggtccgtgcccgacggcgctgtagtacgacgcgagccggcgctcgagctcctcgacgtgcacgatcagcgtgttgcgcagggacgagtaggtcaggtgggccggcatgttggggatgccgaggtcgagcgcctgaagggacggcagagcgtagccggtcgggaggtacgacgagaggaaaccagactggcagagagagaacgcattttcagtggacagcagcgggcagtcgccgaggttaaggggggagacgaggtcggaggctcggtcagcccagctcaatccgccagcactgcgctccggccacctgccaacgaaagctctgcgagcgactcacggcagaaaaggcctcagcctcaggaaccgaccagccgcgtcgccgggttagaggccgcttcggccgagaggtcgcgaacacatttgatgacgaggggagcacggttgacgtgggctccagcgtcgacggcctgtcgacggtggcgaggttgtcctcaaagcgcagtgtccggcctggtgctgtcgctaccatcaatggagggctctccttcatccgagcgggtcgccgctagaggctttgcctgggcgctgttgaggtgtcgtgagaggccggaagaggtcgaaggactgaagtgcacgttgggggagaggaaaggggccggcggcggccggccggcggcaacaggttcgccgccgccgccggctggctgctccctctgaacgtccaaagccctcccgtcctattgtaaagcagcccgatctaggtgagcaggctactcgcaggctcagctcggtgccactgggtcgtccgtgtcgtcagagggctgatctccatttattcctgctctcgatcgaagcagacccagccagcaccccgaacccgccgacgccgagcaacctcgcctccaccatgtcgtcccctgcttctgtctaccgcgccctccttcgccagtcaaacaaggccgtcagtctccatggcctcggtgcatctgcgagctagagtgctgacctcgagcgagcttgcaaccttggcagtcgattcatgccccgaccaagcgcaacgccggcctgcaggcacacctccggcggatggtcgcgggcctgccgtcgacgtcggccccgacctaccaagccgcggcggccgagctgctcgaggttgcttacttcatggaggctcagcggctacacggcgtgcgtccagcgtgccctcgctgctcctcactaggccgtgctaaccggctcgcacacccgccgccacccgccttcccttgcgcaggagctgctcgaacgctacaacccgacgcacggcatgacggtccaggagcggacgcatttgactgctcggcgcgttggtctcgacctcccgaccgaggccaagccgatggattgaatgagaagattgctcgctcaagggtggtcatgcggacgcggcagagtgccgggtgctgtcggcgggtgcgcacgcctcttacccggactgggcggccgactcgcacgatgactcgagtctcagcagacgatagaagggcggccatagtgttctacaagaggggcggacgaaatcggacaacaggatgaagagaagaagtggaggacggtctagcgctatagaggaaggctcgctcgctctacagatcgtagacgacccggccgccggtccaggcaaactggtagctggcctggtagaagtttcggaacgagcgccggccggcgatgcgcgggtgggtcagacacgaggcgccgaggacgacgttgtgaaggccgtcgaagaagtcggtcgagtagcccgggtaggcccggccggcctcaaagcccgggtggccgtcgagaagcgtcgacgtctggacagaaaggaagcgtcaggcgttggtcccgggcgttgtgcaggcagggccgactcacaaactcccagacaccgccgttgtggccaggcacgcgaccggtgccctcgtcgcgcgagagctcggcagggaccgggtgcctgcgagacgaagggggataggagattaacctcggctgtgaaagagaagcttgccacgctgcacaggacgcaccaattcttgaggccggtgttggaaccctcccagtcggagcggtcgccctcggcatggtcgagccacgcacggagctcgggctcggtcggcaagcgtccgcccttgctgcgggcgtaggccttaagctccttgaaggacgccatgagcggccagtgctgagcgacggcaaagtcgacgggcccgtggagcgtcttgacctgagtgacggagagcgcaagcaagcgtcagcctcgctcggctggcgatttgcgcttgtgttgaaacgtaccttccagacaccgccgtcttcgagccagctgccagggagggcgcgctcgcccgtcgactcgaggaaggtcttgtagtcgccgttggtaatgagcttgcgcgaaacctcgatcgatccgacctcagcgtcgtgcttgccgttctcgaggtcccagccaaacgtgtgcttttcccagccacgagcgtcagggtactgggcgtcctccgactcgacgtcaacgatgccgagggagatacgggtagggccaagcttgacagtcgccggctcggcttggtcgcgcgcatgctgcgcgtcccagaggcgggagagcgatgcccagggcggcgccgtgaagccaggcggcggcagcgtctcgggcgactggagcagcatgtagagaagcgtctcagagtgcatggcctcgtgctcgaagcacatctgacgaaagtcaggcaaggacgatgtcagccgtcgggcagccgacctgacgcgaagggagagacgtacaaagagcacccggccgaggccacggctgagcttgcggcggccggccgagatgtcgtcgtagatcgacaggatcctctgccgaacgcgatcgcggaagtcgaggatctcgccgagcgacggccagtctgcgagagcgagaatcagatatcagccgccttccttgcaggtcagggcagagacattcgagccacaccttcggcgttttggggcacggcagagtgcgcgtggcactgtttagggttgtcgacaatcgggtcgatgccccgctcaaagatgtcctgttggcggaaggcgagcgtcagctcgaatgttccattggacgagaagcctttttgcttccgcaccttgaagtgctctggctcggtatgggcctccttgaggaagcgcgagaggaagatgtcgaggaaggccggaacgtggccgaggtagaagaggtctgataaaggacaatgcgtgttagcaatggcggctggagccaattgaggagatggagcgcaggcgacgtactcttgtgccgcaggtcgatcggcttctcgtgcagcatctcgggcttgatcatgccgagcgtgatcgtatcccagcagtgccaaagctcctcccactcgtgccgctgggggacgccgagcttgttgtcgagctcgagctgacccatctggccggcgagcgtggcctcggccgccgaagccggtgcggccagcgccttgttgaggctcgcaaagtggaagggcggccgctggagaacccataggttgtacgacgaggccggcgcattgaagcgggtgatcggccggaggttggcgctttcaaagagggcgagcgcctcgctctgcgaatacttgtacgaccattcaatgttgacgagctcgtccttgtcgaacgcaaccttgagcggctcgctcatgtcgtcggccgcgtcggccgggatgtgcagggtctgcgcctcgagggagcggaaaaaggcctcatggcgacctgcaaggtaaggagaagagctgttagcggcaggctagagaggcgaatgcgagcgaagggaggacgcaccctccttgacgtcgtaacgaccctcgtaggcccacgtgtccttcattgtcccggccggtccggtccagccgacctgctgctcgacgccctgaaggaggaagcagccagcgtgcgtcagtcgcagccggcatagcaaggatcgctggcagccgccctcggacgactcacattccacatgttttcagcccactcgcgtgtgatgccctgcgggtcgttgtaggcgcgctcaacgacgtcctggtcgttgcggccgtcgaggccaagaacgaggcagtcgcccgagccggcccggagcgggatcgaccgcagaaactctgccgcgtccggccgggtaaagttgccgagcgagctgccgaggaagaggaagtgggtcgggacgtcgtcgttggctgccgaaggctcacggtgtccgtcgctgagcggagcgcgggtcggcgagtcatcccgggcggccgggtggacctcgggcgagtgcggcggcgaagaagggagcgatggctggagaccagggtacgactggccagggacggagctcgcccggctgtcctgcgaagccgagcgcggccggcccttgccgttgaggccgatcgagatcggggccgagcgctcgtacgacgagacgaactggtcggcctcctcgtccgactcgtcggcagggacggcggccttccgagtgaggtgcgacccctccgacacccactgcaggccggcgtcaaacgtgccccagacgccgccgatggccacattgccggccttcatctccttaccaaaggacgacgtcgcgaccgtgtcaatcgtacggacgagttcggcctggtcgagatcgagcgcgaggtactggatctgagtctcggccgagcggtcgccgtgcctgtgcgagagcgccgagagaaggtagctgcgagaaacaggagcaaggcgagttgtcagcgccaaatgggcagcaaagagttcgtccagacggacctcgttttgctgaggctgcccgcgccgagctcgaggacgacgccctcgagcggcacgcctgtggcccgactctgctgggagccctcgcgccggccccgggccttgcctgcagcgtccatgccctcctcgccgttgacgccgccgttgaagcggccgacggcgtcgctcccccagtcaccgacccgccagcgagggacaggcgtccggcgtggcgccttgccgccgtcctgctcggcctgagtgccatcgcgctgtgcaccggccgatgacgacgctgactcgggctgcgacgggaagaggatctcgacgacctcacgcgagaagcgcttgagcaggccgagctcggccggatagaggtagtactcgggcacgtcggtcgtgatcctggcaggcggcgacagcagcggtaggatagaggccgagtcagtgatggacgagcgagagagcagcgatgatggcggtcatccctcctccggagaccccggcagaaggtcgacgacgcacttctcgtagatctggaggccgcgctcgtcgtagagaagcatcgtcggcaggctccggcggaagcggaactttgggtcggcagaggagcctcgccagtcggtcgtgctcaggcccgcccggagctgggagaggagcgagctcgatggcggcgagaggtgccgaaggtcgacgacgtcgtggccgtcatcggtcgtcgagcgggccggcgagggtggcgacattgagagagagacgagagagggagataggaggtgcgatgggatgtgcgatgggatgagcgatgggatgtgttcttgtcggttttctggcgagatggccgatgggggttctgagagaaggtgagatggaggcaaggcagggccgtcttgagtgggtgggctgaaccgctgccgccgccgacgcccgatgcgttcggtcatcagcttccttcggcacaagaccaaacaagggccagccgacgcggaaggccgcatccgactctcgagaaatcttaaagggtcgggtcgggctgaaggctcggggttcgggctcgaggtcgtcgtcgcagaggctgacggcggcgcttgcttcgagtcggccttgctcgcaaccccctccattcgagcgcgccggctggtcgaggcaagtcatgttttcggtcgaagaagcccctcgaccgcgccgtcatccctctccgctcaggccgccgccgccgacagcacccggacggtccggtccatcccgctgaggacaatctcggcgccgttctttgcaaagcgggcctcggtcagctcgccggcgttgccgtcaaagaggagggcctcctcccacgtcttgttcttgaacacgcgcaggtcggtgccggcgacgctcaggaactggcccgacgggtcgaaccggaccgagtggatctttccgccgccgggcgccgacgccgtcgggagggcgatcgtgtggatctggctgagcttgcggaggtcaaagatgccaaccgacgagctcgcgccgttggcgacggcgaggtggtagccgttctctgaaaacgacagggcagggacagccgcgcccgattcgtttgagagcgtcgccgcgagggccgaccggtcgcggacgtcccagatgcggaccgagccgtcggccgtgccgccgccgtgcaggaggccatccgggtggacggcgaacgacgagtaggcgtacgagccgtcgtccgacgagagcgcctcgtacgtctggacaatctcgccccgctcaaggtcaagcagcgaccacgtcgagtcgaccgaggccgcagccgccagacccttcgaagggtgcaggatgaggcttgagacctcctttttggagacggcaaccgtgtgcgcggccaaccacgagccctccgactcggcaaagatcttgaccttgccgtccgcggcggccgagagcgcgagcgagggcttgccctcagcctcgcggaaggcaacgctcgagaccttcttcgtgtggcccttgagcgaagcgacgaccttctcggacgaccggtcgtagatctggacgagcttgtcggcaccacccgtcaggagcaggttgccgtcggccgagacgtcgagcgcagtgacgcccgggggcttggcggcgtgcagcgaagggatgtcgagcgtctgcatatagcccgagacggtggcagcgtcggcgtagccgggcggcgtcttgcgcttcttgcgaaccgacgagagcctgcaaacggtgagatcaagcggccagatcagccatttgagctttgccgcctcctgaggacagcgttgaagctatgcgcgagaagaacgcacgccttgtgcgtcgcctcgagcgtcgccttgacggcactcggcaggtcgccctcagcgggctcagtcgaagcctccatctcgacgtcgcccgctgccggtgcagcaccctccgcagccggcgtgacgcccagcgtcgactgaaccgaagcgagtgccctgagagggtggatgggtcagccgtgtcccttgcagctggcagggcgcgctgagcaggaacgcactcccgagcctggtcgcgctccttgacgagccgggcgacgacgcgcaagctcgcgtcctcgcggtagagagcgtgagcgagctcctggcgagtcgactggtactgctgcttgagcgcgagcgactcgagcatgagcgagtcccactcggactgaagcgagtgcagcagcgcggggaccgaggtcgccgccgacggacggggggcagtcacgttcggcgctgagcgagagaagcaagccgttacgggtcagctcctgcctccaattgccggcagacaggctgagcgctctgacgaggagcacggctcatactcacagaccttgacctcaacgaggtcctccttggccaaagcctcgcccgagatggggtcgcgcgcattctcgtctgctcgagccggccggaagctggacgtcagctcctgagctctcttaggcaaagctgtcggccagcaggcggctcctgcagacgacgcaccgatgtacttctcgatgagagcccggtcgaacaggttgcccgacttggtcgagatgaccgggtgcgttggcggcgtgcccgagactgcgagcgcgggcggagcgtcagtctggccctcttttctgcatccacagcttccgagtagcccggtggccggctacgcactagcacagaagaacatgtttgcggaggatggatcggatggaggaggagagccgtcgcgaggctgaggccgactcgagccgcgtccactcgagagattcttgaaagcacgcgcagacggcgtcaattcatctatcgccccgcagctccggtcaacggcgtccgccgagagcccctctctgcgctccatcagtcgaccacacccgccgttcccgaaacggccatcgcgagctaaagcccctgcatctgaaccgagccggctgacctcgcgttgcgcggccccttatgcggacgagacctatagcttgcctcttaaaggaggcctggggaggcagacaagctcgtccttccttcttctcaaccaccctgctgccgcccgccgtctcttctcatcagcatgctcgccgccctcgccgcgcctcttgcgctcgctgctcttgccctcgctgctcttgccgccgcccagaaccctagctgggacgactcgacccgctcgcctttcacgcccatcacgctcaacgcgaccgacagctcgatctcggccgtcttcctcccttatggcgcgacgctccaggcgcttttcgtccctgaccgcaacggcgctcagcgcgacgtcgtgcttggctatgacgacccggtccgctactcaaccgatcctggccacccgaactttggtccgtccgcgttttcgtccgtgcactgctttcggcgcgtcgccgggcgcactcaagcgctccctcgtccccggcggccggtgggacgacggcggccaagtttctcgcagactcttaacgtcatgctctcggcgctgacttctcctgcttgcttgcaggcccgatcctcggccgctacgccaatcgcatcaagaacaacacctacaccgaccccgagactggcgaggtctttacgtcggtcgcaaacgagaacgacggcgccaatacgctgcacggcgggccttacggctggggctggcggccatggacggtgaccaaggtcacaaacgactcggtcactatgtcgttccacgacccggccgggcttgagggcttccccggcgccgtcacctcgcaggtcgtctacacgcttcgggcgggcggcatctttgacatcgatctcttcgcccagacgacaaagcggacgccgctcctcgccgttcaccacggctactggaacctcgacggctacgcggtcgccaactcgagcgtccgcgactggatgcttgcgatgccctatgcgtccaaagcggtcgaaacagactcgatcctgatcccgaccggcggcttccgcaacgtctctggcacgccgctcgactttctccaggcccggccagttggccagaactggaactcgactatcggcttgcccggcccgggcaagctcggtttcgacacgtgctgggtcaacgacgcctgggcgccggcgaccgacccaaagctcaagatctggtcgccggcttcgggcatcaagctctcgctcacgaccgaccagccggccatccagatctacacgtgtgccggcatggacggcacgacgccccgcaaggcctcgcaaggcggcggctttgtcggcaaggactcgtgctttgtcctcgaggccgagggcgtcattgacgcgattaacaacccgagctggggcatcgaccagtggtactcgccctcgcggccgtactcattccacgcgagctacgctttcagcaccgtctgagtccgccgtcggtcagagatgtcatgactagcatcgtcgtctcctctcagccggcaccgttccaagtgcctggttggttgaacgactgggtctgcgctctcgcgagctgggcttggaggagggccagctgcgttgcgtgcgaaggcgctggggcgtgcgtcggtaacgagagggcgaaaggcgcttgtgtctgctggagttggcttgtgaaagactgaggcagcgaagcgaaggggggctgagcgacagggcccttgccgccaacgacggaatgcactgggagcgtcttctgcgccaggtgcggaggaaacggcgacatgtcgctcgaggagtttggggtcgcgccgacggccgcagacgcaggcgtgacggcagaagcggccgccggttgcgccttctttttcgactttgctggcgcctttttggccgtcgtcgccggcttcgtctcgtccagctcgaacgccgccggggtcggtgctgccgtcgagtcgccgccctcagtggtcgcgtcgggctccttccgtttcttcttgccgccggaggccttcttcttgacaggcgctccggtcggcgtcgcggcgtccttgccgggcgaggccggggccgtagtgtccttgccgggcgaggccggggccgcagtgtccttgccggttgccgtctcgccgtcgaccgcgggcaccttcttcttcttcttcttgccgcccgaggctttcttcttgggcgcgccgtcctcctcgtcgcctggcgctgcgtttgaggcgcggcgcttgcctccggccttgcctgcaggcgagtttggccgcgattcatagacgttgccccctgccccaccagccgaagccttgtcgggcgagctcccgcccggtcttgagggcggcggcgcgagccggctcttgaacgggtccgggttcttgagcgagtcgtctgttgcggcccgctgccggaacgactcgatattctgcaggcgggcaaacgtcgcgcgaaagttggccgtatgggttgatgacgagggtgcaccggtgcggaggagcgagaaggccgaggacgggtcgccgtcgtcgtacgaccgggtgcgcagccgactcgacgacgggcgcgctgccgtcgcgagggctgacgatgatgagcaggcctcgttggcgacccgaagcgcgtagagcgatgtgcccgtatgcagtggaggcgcggtcgaggcctgtttgtgcggcgacgttgttagcttcgggtccttcagaggcagcgtcgcgtccagcgggcgcgactgaccaggatgcgcgcctcgacctcgagcaggtcgccgtcgtcccaccggccgcggccaatctcgtcgctcagcatctggagatcaacccagctgctctctggcgtcggctggaggatgacccggaccggcgtaggctgcggcccgcccccgccgccgttgacctcgagcagcgcgaccgacgcccggaagtcgacaagctcgacgatgaggcatccgtcgtaaaaggcgatcggtacgccgttaggccgaacggtcgagagtgtcgagagaaactgagcagggatctgctgtgccttgatggcgtcgaggaacgcctagagttgtccgagcgcagacaggcagagcgccggacgccagggcgaggtgtcagtcggagccggtcgggctcagcttggcgcgttgctcgctggtacacgcacgctcatcgggctgtcatagaggaagatgccgctctggagacagcagcgttgagatgtcagctaacggctctgtgacaggacaacctcgggcagagcactcgcacctgatgctggaaccgaaagtggttcggatagagctcgatcgtgagcgacgccgacgacttcctgaagcgcttgaggaagttgcgagcctcacgcggcacgctgtagatggatgcggtcgacattggagcggaccagcaccggagcttgatggagatccggaacctggaggctgccgagggtcagagggacgggatgagtgctcggggcgacgacgtggccagcggcggcggcgacgagctggttcggtcggctgccggctaccctcagacgaccactcgaacgcaacctagcactgccagctctcatcaagattagcacagggagaaccaggatgccgcccatactgcagccagcatctctccagatccacaacacgaccgtcttcccgctcgaggttgccgtctcgagcagcccgcagcaggccaccaccaccaccaggacggtagtcgccgctcggggcgcagcccacctccgtccttcagcctcccgccagaagagacggccggtggagctctcgatcacgagggcagacggagagacgctcgttttcaccgaggaccgcaaacggcggaggcgaggcggccagagctggtctgcgatggtgctgacgccggccgacggcgccgggaccaccaccgccgccgccaccgcgcacgggcacccggccgactcgacctcaacccttgacggcggcctgcccaagccgagctggccactgaaggccttctaccacaaggtgcgagttgctgacttcgtgccttcccagccagggctgacctttcacgattaagctctcgcatgcggtcacgctcgcctcgacgccaccccttcactcgtggatgtcggacctgcccgacgacatctcgctcggggacgtcatgctgcccggtacccaccagtcgaccgcgctctacggcttcccgatctcacagtgccagcagccgagcacgccgctctctgtgcagctccaggacggtatccgcttcctcggttcgtccgaactgcgcagcgacgccgaggatgagtcgccgacttcagtgctgacctacaatccctgtcgcagacgtccggctggccgagaagaacggcaagctcatcgcctatcacgggatcctcacccagcgcgccagctttggcgacctactcgctcaggtcaagacgttcctgacggcgccagagtcgtcgcgtgaggtggtcgtcatgtcaatccagcaaggtggggtcgtctcggctatgggcagagcactcgcgcaccactttactgacttgtgctgttctccttcacaccttgactgctcagagaacgcgtcgacgcccctcttcctctccctcctgcgcgaatacgtcgctgcctcgccgccttcgctatggttcctcgcgaatcggatcccgtcggtcgcagaggcacggggcaagattgtgctcttctcgcgtttcggtggcgccggcaagggctgggaggcgctcggtgggatgggcatccatccggtcggctggatggacagcgtgcgcgatggctttgaactcgaactgcccgaccgcagcagaggtggcggccggcctggcgaggtcggctggggctggacgctcggcatccaagactggtgagtcttccttctttttggaacagtgcacgtgacgaggcgctgaatttgctacctgtggccaggtacaacattggatctgttctcgccattccagagaaggcggcagcggtcgtctcgctcctctcgcgcgagacgccccaggccgagcacgtcggcctcgcctttgcctcggcagcctcgttcccgctcgcctgccccgtctacgttgctcgcggctttggctggtcggcgctcggcgtcgcgggcgtcaatgcacggctcggccggtggttgcttgaacgactctcactcgcaggcggtgaaggcggtggcgagaatgccttctcacgagctcggacagagtacgccctccgaggctggctactgtttgacttctaccgcagcgagcctggcctcatcgatctcgtcgtggctttcaactacgtttgattgcggttgttagtctctgtctcgatccgttcttgcgcaatgacgccttgacgcttgagatgtgcgcacggcgctctcaagagtggtcttcttaagtcaaaggaggctggcgacgtcaaacgggcagcaggcatcatgaatcggctggcagacaagtctaggcgtggtgaaggggtcccaagaaggtgtaagaaaggggcagatacagtcgtcgacatgaagcaggaaggagcggagccagtgaaagaggaggggaagatcgagctcgaagcgtacagaggttggtcgcgtgcgtgtcagagggtcttcggtcctaggtcctggtaggaggagggagccagtcagcagtcgaacatgggcagtgggcatcatcattggcagcgagcaacataccatgggtacggtcatcaaagggcgtttcatgagcgcagagaaaggatggccgtgcagacttaaaagcggcatgggcgaggcccttggtcatgcccgctcaacgattaatctgtttttgccaaggtgcttcggcgaccggagctatcgacgaagccgctcagacaagctggccctgccagcaatcgaacgcctggagcagagaacggcggtcagtcgaccggcttgagcccagaaagagaagccattgtagcggaccttcgtcatcagccagaggccgaggtaaggccacgacggcgcaaccttcttgacgacaacaatctcctcggtgatctgaccagccgcaaagggagggggggggggggaggcgtcaaaatcagtcaaagagtaagaatggggttgcagaacaggcgagcgagcaagtgcagcgcagggacgaggcagaggcaaaacgcacaaagtcggcgagccggtggagctgttcctttgcctcgtcgctctgccgctccggcggctggctccggtcaaagaactgcgcattgttgttaaggatcgcgatcaggtcgtactacaagcgtccagacgcgaaacaggcgcagatacagtgatcagcgatgatcgtgcgggcggcacagaggggcgagaagtcggtccgggagcaaagagcgccggccggcaaaatggacgtacaatgagtgcgctcgactgttggacatcgaggtagagaatgctggccatgtccctttggaggagcaacaagccgccaggactgcccgggatgtagcccgccccttgaccgggctgaccacccgacccgccctcgtcaaagccagcggccgacgacgcctcgctcgcggtcgagctcttgcggccgtaggcggcagcgtgtgccgcagcggctgccgtcgtcgcaggatggacgagcgggtgctggccgagctgctgctgctgctgctgctgctgctggaggtgaccgtggcctgccaggggccgatggagaacctggtgcggctcgaggtggacgccgcccccgcggcctggggacgaggctgcgctgacctggccactgagctggccttgagagccgggacctcctgccgaggggacgtgctcaaagtgctgaaaggagccgacgccgagctgcatgctggctgccgagggagagagaggaggggaggggctgaaacgccggtgggctggtccggtcgaggcggacgaggcggacgaggaggcgtcggctctgaaggctctcgaagcgaggatttcgtcgctggtcagagcaacgtcggtatgcgtccttgggagccgaagggatgggttccgggcgaggaacgtctgaagttgacagggatcggcgtcacgggccggagctcttcggtcggatgcgacaagcttggggaagcgtcaggaggcgtcgagggtcgttgttccttcttgcgactgagctcgttggaagtcgggaccttcttgaggggaccttcgagagcgggcagcgagcgttgctgcagactggctcggggacgatgctgctcgaggtttgaagtgagcagaggcgtccggctcgacggcgcggaaggaccggttcgtcgactccccgcagcggggaacctcttccagccgtcggcggggcaaacgccctctcttctggttcgccgcctgcctcgacgagggccagagactggcggaggtggtggagaggtggaaggtctgggattaatgtcgtgaggccgtctgaggcaagcgacgtcgtcctccttgcggttaaccagctcggcgacggcgacgcggcctgcgcggccagaaagaggcatcggtgccgtcaacgcattcgcctaagatccgacagacagtcctcgctggcaagaaagcgtgcatgtcccctcgctatagctgtccggccaaataaaaaggggtcaggctgccgcgactttttggacgagggcgacgaggtgcgagcagcaggtcgaagagacggcctcgcgcagcagcagcacggccagcgccgagctctgcgccggaaggcctgcaagacggcgctggcgagaagcgtcgagcgaggacgcaagatcctgtgtcttgtcgagctgtcccgtctcccaggtcaccgggatttcggctgcggacccggacgagtaggccgactcgccactcgtgcctgcctgcctcccacgtcatgccttgcccggccgatgcagcggcggcaggttgggcgatgaggaaaggcggcccgcttcccttcgctcgacgccttgcctccgaccacattccatcacccacacctcacacgcacccgcagccatgccgtcagcagcagccaagacccaggaggcccgcaaggaggccgccattgccgagttccaggagaagaaggcccagctgcgacagtactcggacgacaccggccacttttcgctcgtccggttcgtcctctgctcctcgccctgcgtccgtccctctgctcgaccgccgcgctctcttcgcaagttgagagccccagtgacccgttgagggcttgctcggagtcgcgctcccagcaggcgtgatcggcctgggctggttgcgtcctcacccagacgcgatgggacgaggccgatcaccctgctgaccttgcctcgcaccctctttctgctcagcaacttccgcctcgccgacctcgtgaccatcatgaacggcgtctgcggcctcaactcgctctttgcctgcgcccgcttcctgattgacccaacggcggccaaccggccagcgctttggcttggactcgccctccccgtcgccggctttggcttcgacgtctttgacggaaagattgcccgctggatgcacagctcaagcatgctcggccaggagatggattcgctcgccgacctcgtacgttctcgctcaaggcagccttgccgaaggtcgccgacgcttcgagttagactaggacgtgcttcactgactcctcggcctgcccgcctgcaggtctcgttcggcgtcgcgcccgctttctgcgccttcacgctcggcctccggacgccgattgacgtcttcctcctgacgctcagcgtcgcctgcggccttgcccggctcgcccgcttcaacgcgaccgttgccctcatcccggccgacagcacgggcaagatcaactacttcgagggcctgccgatcccctcgtcgctcggccttcaggcgatgatggccttctgggttcacaagggctggaccgcatacggcacgggccttccgctcggcgtcctcgccgagggtcgctggtgcgaggtccacccggtcgccctcatctggggcgtctgggctgcttcaatggtctccaagacgctccggatccccaagctttaaaaaggtgtagagggcgtcatcagtagctcaacctggggtggcgacatgggccgggaggaagggactggtcgctcgctcgcgcagacagagtcatgatcatttcacctgggcatcgggcttgtcgcaagctccggctgagcgtcggggcgcgcaatggagacccgtgtaggcttctgtctcctatctcaagcctcagcggtggcgcctcagtcgcaagcccggcccgcatgacttttgccctgactgactgctcgggcgcctggtgactgctttgaaccggtgaggcctgccctcgttcgcgcccccgtcttaccacctcggcggtgaagcagcttgttcatcccggacgagggcaccaatctgcctcaccgcgtcctgctctcagctcagggcagacgaaccgtccagctcgcctccagcagcagcagcctctgcctcctcccagtcggcgacgtcaaaattgaccgtcttgacctcgagcgtcgcagagtggacgaggacgagcgtgcccgactgtgcgaaccgcgggaggaggacgacccgtgtgcgctcgccggcggtatctacgaagagtggggttggatcttggtcaggatcggccggggatgccagagagacgaaacggcaacgcactggtagctagactcgtgtcaaagtgtggctggttgccgacgacatagatgtcgggcgcggtcgaaagcaaaaatggatccgattcgtcgaacgggtggcacccttcagagaggacaaagagagaggcaagccgggtcagaggcctgctgcgtcggagactgagattggagatcagagacgcacacagcgtatcaggcgcggtcggcgccatcgacctccactccagtgtcctctgcgcgagctggagccgggtgtcgtcgccttcatcgtcgccgctggggacatacttgaacatgtcgtcgacggcctggccgctcgtcgcgagcacgttcgccggcccgctcgcgaaccacgccggattcgtattgcagacgaaaccggcccaggccgacgtctgcttaaacatgagtcgcggaagcggctgctgggggagcgtctggcctgaggggtcggtcgggccgggtaggaggtggatcgggaggaggggcgcgagcgcgctgagcacttcgtcgagtgcggagactggcagggtcgtatacgatgacggatcgtagccgtagactttctgcaggcggcagcaggttaggggacaacgcgtcagagccgcaatagccgtttcttcagaatactaggctacggacctgcttttccgggtcgacctttggcggcgccgcgagcgagttgccggccagtatcaagcgcgatacgctaccgccgagctccgagtcctgcagcacagtggcgatactcgagtcaatgctatgcgcggcgccctacggctgcatgcagtgagagaccgacctcgtcgcccgccgcctcgcccatcaggtactcgaccagcagctggacgcgcaagtcggcaaccgcatccccacccttgacctcgaggcccgagacgaaggccagccatgagccctcgccagcagcctcctcgccgtcaacagccatctggttcgactctggcgctgcgggcggggcgtgcaaagggatgccggcgtagcaaaagtcgacgacctcaaagtcgccggaggacgactcgtagccgagcgcggcgagaatgacacctaaggcgggtcatacgtcaagtagagagactcgtcagcgacgagagagctggtcgggagcaccggaaggccacgcacccgtcacgagcgtctcggacgccagccttgggccgacgagctggacgcgcccgctctcgtcctcgaggacgaccgtgtcttcatccgaaaagaacttttgccgcggcggcggagcgacgatccatttctgtgcgtgcgcgagagagggagagagctagacgtcagctcttgaagctaatcgggggtgtgccggcgcagcgcttcctcaggaagagcaaggtcggacgaacgtccttggtgatgtcttcgaggacgtttggcttcagcggcatgtccatgtagacagtgccaaggatgtagcacagctggccctgctggacgtcgagcacgcggtcgacgagctttggctggcctgcgagaggagacggggttgactttcagctcagctcgggaggtcggcagacacgagcgagcgtgcgagcagcgagagaagcacgcaccggccgctttcgcccatttgcgttcggcctcggcctggacggccgcccggagctgaacgagtcgggcaaagtacatgttggcgtactggtggttgtagtttcgcgtctgtgatcggaggacgaacgtcgacgcgagctcgggcaggggcgagaaggccggctcgggccgggacgggcgcgctggagccgctctggcggcggcaggcatggtcatgtgcgggtctggcagctcgacagcagggggagagaggctgtagataagactgtcgaggcagaactggaggaaggggtgatagctttgggacgcaagtcgactcctggtgctcgtcgcgtctggcgagcgcgccgctccgaaattgcctccgacttcccggccgcccgtcgcgcagacgacctcccctctgcgcccctggacgtcaagtcgagggtgttagctgagttgcaggtcctgtcagccctgtcgaaggcgttgtcgatttctgacgcgttgtcggaccaacaactgctatgctcactgcatcgacgatgaacgactgctgcgtgacggccggctgcctgctccgggcgaccagccctggccgctcaagatcgacaccgcaatcctggttcacgctaggaaagtgacagccagcccgtcacgcgcacctcatacgcagggaatcggatgacgctggagcagacgttcctcgctgctggaacttcgtgaccgcgcggacgaaaggcaccctctctgtctgtatttaagcttcgtcctcgctcaaagcagcctcctcgaccagtagagtgcgccgagtcgctgaagggtcagccgaccctggcatattaaggttgctcgaatgataggcacctcgcaaagaagcgaaagagaaagagatgctgagcacgcgtctctcctgtgcggccgacgacacaatgccccggaggcaggtagatggacgccctcgaggagcacagccaggaacaggcccgcagggtgtgcgaactgctcaaaggcgaagcgcggctcgagcgaaggaaagggaagggccgaggctttcggcaggggcccggcacgcagtgagaaatatcatccggcgggcggaccatccggccagcttgctgcgcgccaagagaaacgccatccggctgcaacaggcttcgtctgccctgactccgtcgccggtcttccccaacagaccctgtcgtcgacccacaacctcgctctcctctctcgccagcctcgcgcgtatctgcccttcgacttcctcttccacctctcggatctcacgccgacacgccatgagctcggcctgcgtgctcgaccaccgcgatctccgattcagggtccgtcacgcagcccctctctctccgatctcctgccctgcggcgcctccgcccgccaaaagcgtcacagcagcgagactgacgactcccctcctcttctctcacaacacccatccttcacgacacagacgaccacgcctgccctcttccagcgcccggcgacgatgccccactcgcacgccctgcccgagcacctcaggaggatgtcgagtcccggcgtcacggccggcgcgtcgtcggccggcgcttcggccggaggcgcgccgacgacgcgcgcccgcgtcgaccgcctcggtcgcaggcctctcctcacgctcgaggttcagcatcgcagctccgacggtcaggtgcgtgcagaggctcgagtagccagaccgtcctcttttcttgcaagaagttgacagctacgccctttttttccgttgttaccttttggctcgcctgcagctcgagacggcccgaccgcgcggtgcttcgtcagcgacctcgatcccaacagcccggcctttcccttcagttgtcgccgccgccgccgccggcacctcgttctgctccatttcgcgctcgtcctctgcgagcagcagcagcagcagtacgagcagctcgagctcggccggctcgagccggcatgacctgctcgatgcgtcggtcttcgccgactttgcccccgccgggacgacgcccttgccggtcgatggcgtcgccctcaccctgccgagggtccgcaccatgagcttcgacgccgatgacgacgtcgcctcgtcctgggtgcgtcttcccttctaagcgttgaagtcagcgttttgtttcgctaacaagctcatctcttttccaccagtcggacgacatggagggcttcccatcggtcgccgccccttcgtccggcgccaagtcggccgtcggcgcctcgcccctctctgccgccctcctcgcctccccgtccgcgccagcgaccgagcggcccgtctcgcgcgcgtttgcctaccgctcgcaggctatccgccagctcgcgcccgcgccgccgtcgcccgtcccgtcggaagaggagcggcgtggccggcgcggccggtcataaccccggccccttgggggtcgcctctgtgtgatctgcccatcgcctcatcaaactctcggccctctccgtttgccttgccctgcttgcctgtgacaccaccccgctctcctgcctgtgcttgtcctctccgacccttgcaaccctccctctcccccccccctttcctcaggcttttcaacttccttgtcgtccaggttctgccgaccatgactgcgtcgatcaagagttacactttcttgattttcgccatcgccaacgccctcttcatcccggtcatctacatcttctacccggagaccaagggccggacgcttgaggccatcgacctcatcttcgccaaggccttcgatgagaaggtccggccgactcacatcgctaagacgatgccctcactcaccgacgccgaggtcgagaacgacctcctccggctcgacgtacatggtaccggcaccggcaacgctgccgagaagggccacgccggccgcggcttcggcgatgacgcgtcctcggacggcgacgttaccgcccagggctcgccccgtgcaaccggtgacttcgcacaggagctcaaggccgaccgggccgccgaccagaacccgatgctcaagagctaagtggcggtccctcctcttttgcatgggagaacggccttctccccaccacctcccttcgcatcttcccatcttgccgatctttcggcccatgtagcatgctctcctctcaccccacctacttctcccctcgcgcttctgatcactacttagaccgcaggcagggcggagagacccccaaaccctgtatctgctatagaggattcctcgcttcgacctactttctgctcctgagcaagtgcaacaatcttcgagcgacctactcgacagcgaggttcgacttgagctggttgcccgaagggagaatgcaatcgtgaaggccgctgcggcagcctccctgcaagtgcgcgcagtagacactcacgcgctggccgccttcgtttcaacgactcgtcatgcaatcacgatgcttcctcctcttccccggccttgcctgcctccttcttccgggatctgcaaggaaagtcaggcggtggttaatgcacggcagacgcaagcgaacacagactgccagcgacgcactggacgaccttgtcgatcaagccgaaccgcagcgcctcctctgggtcaaggaagaagtcgcgctcgagcgcaagctcgtacctccgcatgcagtcctccttgctctcgagctcgccgccctcgaccccggctttcgacacgcggcagtgctcggcgtagatctcggtcaagcgcgtgcgcgtcttgaggatctcctcggcccggatcgcgaggtcggcggctttgcccgatgccccgccggacggctggtgaatcatgacgcgggaccgagcgagacatgaacggtggcccttggcgcctgggaggagagcgaagcgagcgagacaagtcaggtcctgctgccgcggaggagttgtcgcacgcgaggacgtaccgccggcgagcaggagggagcccatagatgccgcctgacccatgcagaaagtatgcaccgggctcgagatgtactgcatctatcagacgcactgccaatcagctctgaccgcacgagagggccttgcgcaggtggcagaaggacggaccgtgtcgtagatggccaggccggacgagacgacgccgccggggctgttgatgtacatcatgattggcttcttcggatcgatggcctcgaggtagagcagtgaggcgacgatcaaggtcgacatcgtatcgttgacctgacaaagagcgcgagggtcgaagggggtcagcaagagggatgagttcgagcgcagccacaatctcgaggccgtcgagggacgcaccggtccgacagagaggacgcgctccttgagcagccgcgagaagatgtcggtctggtagccgcctcgccgagtctagcgtccgcggaagggcagccagagtcaagtcggcgtcagcgatgcaagccagaaacaacgagtgtcgaccgcgcgggagaagaggagaagacctgaccgtgtcctcaacgtaaggaatgtggatggctcgtttgctcccaatgccgagtggcgacaagccctttaacctagcagacggaaagcagaagcgggaggacgaggccttggagcctagcgagctcgagtatggccggacgaggaccgaagcgagcgcaggcggcaaggacgaggaggaggaggaggcgcctcctgaccggagaaggagctggccgcgcgatgccgctgctgcagagctgccgcgcatgatcgttcagtgcctgggtaggaagaaggtcgtgctcgcgggatgtgtttgatgaagaaggaggccaggcgaggaggcaaggtcggtcgagatggtggtcgtcggcagctcgtccgcaacgtcgaccctcttctccgcctcggacccgttctcctcggctacttgctcgacctctcaagaccgctcgcgcaggccgtcgacgacatctgaacgagcagttcgctcggcattcctcctctggaacagcctgacgcacagagtgaagtgaggcctggttcatcgtctcgaagggccgtgacgccgccggcgctcgtccagctggacgacgaacgcacccagcgccacgaactcctgtcctgccctcaggctcgccgactgacatcgcagcctcgcatcgccacagtcgagcctcgaacctacgccagctcaggtgttgcagtcgacagtcgacatacctccttgagcccgccttcaggacgccctgtcgccgccgccgcccgccgcccgtcacgcactcctcgtgccggcgcaacgagttctgaaaaacaggccgaccctcgccccccggcccgcccgtcgccaagtcttgtcgcagcgagtccggaccatcgctagacatgtcgtgggaccgggcgcgctaccagagctcgcggtcgtacccggtcgcctcgaccaacgctaacctctcgtcgtctggccggccaccgtatgcgtcgtcgtcctcgacccggccggccggctccccacctccgtccgccagcctgcctcctgtcgaaagctcatcgagcacgtcgtcctggagcaggtcgcgcagcgaacgcgaggatcgctcggccgtggctggtagcagctcggcctcgtcgagaagggaggaccccggctgggacacgttccgccgcaacggctcgtcgtcgagcacaagcgcatcgcaccaccaccaccaccacagctatctttcgaccgatctccctcctgtctcagcctcatcagcgttgcctgcagcctcctcatcgtcgtcgctttcacttcggcgctctgaaccgtccaagctcgaccggtgggagtctgggccgtctgcctcgggcctgccaccgccgcggccgacgcgcccttcgccgccaccctcaccgcagacaccgacggcgcccaagcgcttctcggccaacaactggggctcggccaacgagcccgctgccgctcaagaggagaaggtcgtcccgcgacggttcggtcccgttccgctcggccccgctgctggctctggcccgccgggtggggcctggggcaggccaagcgccgtcaaggtcgcggccggaccggcagcgaccgttcctctcggcccacagagctatggtcctgtcgcaccgagggctcagcgggccgtggagactcccagcattcccgttggccctgcacgagaccggtgcgtactgacgggctcacgcgctcagttgcggaggccgagactgaccgctcctttccttcgcttgcagcgccccgccgaccggtcccagccggagcagtcgcaccgagcgcgattattcgccccagccgccgcgagcgcctgcaaagcactcgtcgtcgtcgtccacgcacagggaccggtcgagggacgaccacaacagcagtcgcacgcgtcgcgagtcgcccgagagggaccgtgagagcgtccgagagcgcgactctggtcgagagcgcgacgtccgagatcgcgacaacggccgggatcgcgacaacgaccgcgagcgtgagagcggccgggatcgtgacgtcggccggaatcgcgacaacggcgcgtcgtctgcggtcaagcgcgagcggtggccgacggcaagcgtctctgaacgcgacgagaagcgggcccggcggtcgccgagcgtggccgaagcgcctgtcgagcgagaacggaagcggccgttgagacgtgacgaccggtccgacgaccgcggcggcggctggtcatcctcgcggcctccgacgggtcccgccgtcgattcgggctggggctcgaggggcggccggggaggcggccgccatggccggtctactcgcgagcccccgccggccgcgccatcgaactcttcccgcagcggtccggtcgagctcgatgccttcggtcgcccgcggcgcgactatcggtcgccaagccccgacatggaggagatccggcggaagcgcaaggagctcgctgcacgcgaggaggccgagcgggcgcgcgtgcgtgacgaggaggagcgcgagcaacgagagcgcgagcgcgaaaaggagaaggagcgaaagcggatcgagcgcgaagagtgggtccgccggcaggaggaggctgagctcgagcgcgagaggcagctccggctggccgaggtggcggccgagcaacgccggcgcgacgcagaggcggccgaagccgagcgcgcgagacaggcggctgagcgggccgcgagagggccgacgccgccgcctgtcttcgtaccaccgccgcctgccgtctcatacgcaccgatcaagatctcgttcggccagcgtcggagctcgcccaacgtcggcgggcagcaggtgccgccgcctgcccagcgggagccaccgtcccgctcggatccacgggaccgtcggcaacggagcccgccatcctcgacatcgacgaaaggccggtcaacgccggtgcagactctctcttcggaggccgtcagcgaggccatcctacccgcttcgacggtgccaccggaaccgcagcggccgcgcgagacttacgagaagctcgcccaggtcggcgagggcacctacggcaaggtctacaaggcccgcaacaccgagacgggcgccttcgtcgcgctcaagcggatccggatggagggcgagcgcgacggcttccccgtgacggcgatgcgcgagatcaagctgctccagtcgctccggcacccgaacgtcgttgccttgcacgagatgatggtctcccaaggtgcgtcaatgacaactcaatcttgcccatacggctgacccattgaccatccttttttgccaggcgcctgccacatggtcttcgagtacatggaccatgacctgacgggcatcctgtcacagccgcagtacgtctttgacgccggccacctcaagtcgttctcgcaccagatgctctcgggcctcgcctacttgcacgatcgggcggtcctccaccgcgacatgaagggcagcaacatactcgtcaacgcccggggcgagctcaagctcgccgactttggactcgctcgcttctacaacaagcgccgggtggccgactacacgaatcgcgtcatcaccctctggtaccggccgcctgagctcctcctcggcgcgaccgagtacgggcccgaggtcgacacgtggagtgccgggtgcgtttcgcgctcaaaacttctaatttggaagacccgacgctgaccccgcttccgttgccttgtcgccagctgcatcatcctcgagctcttttcgaaaaagattcccttccctggaacggacgagatcacccagctcgagcgcatctacgacgtctgcgggacaccgctcgagcgcgactggcccggtttgacggagcttccctggtacgagctcctgcgcaagccagacgccccactgccgagccggctcgaggagctctattcgaggtgcgtcgaccctctgcctcccaatctatgccatcctctgacgctcagtccgccctcagcatgctctccccgggcgcgctcgatctcgtccgtggcctgctaacgtatgacccgacgaagcgcctgctggccgacgccgcgctcgccatgccctacttcacgaccgaggatccgccgatgcagctcccttcgcagtgcgtcccattcatgccgaagcgagccgacagcttctcgtcgctaacttttctaacttttgcagccttgccgaggtcggcggcgagttccatgagctcgaggccaagcgggagaaggccaaaaagcgggccaagggcaaggccgagggccgctcgacctgatatggctgttatagaagacgactattctatctgcgtcctggggccactttgcagtgcctgtcagctcatgaggagcaggcaggctcggggcgaatgagggagcgcgaatgagggagcgcgcatgaaaggggccggccgaacaaccgctgcgacgcgcagcacgcacgacctgccaaagcgcgcaggcagggccggttggctcctccctctcgacgtccatctcgccttcagtctcgcagcactctgtcagtcggccttgacgctgttttcagaccgagcttctcgacaaggagctgactcgccttgggtgcctgcaacgccgacgttcatccgacagccgctcagcgacccgctgtccttttgctcgccctcctcgcctccactcgttgccatgccgcttccctcgttcgacgtcctccacagcatctttgaccagtgccgacggcgcaagatttcgcacgatcatgccctggactttgtctatatccgggagcgcgaccagtgcttcttccagctcgccttgttaccgagattggcgagatgcgtcggcgccgaactctcctgcgacggacgagcagtctgcctgatcctccgtccttgcttctggtggtagatgccgtccagccgatgctgtaggaggaggtttcgttcggcaacaccatccaggctcgggcccagagggaaacctggtcgttcatcgacctcgtcgcagctcatccaaagcgcgtgcgacgaatacgagccttgaacatcccgagcgcccagattccgctcggctcctccggggcctctcccggtgaaggccatgtccgacgcagtcaaaggcttctgtgacatgctcgtccactttgagtccctcgagcacctcgccctcgtcggcgccagaatcgacgactacacgctcgacaaggcacccgaccggctgcctccgcacgtccgctcgtttgacctcgacggcctgccgctgatgaagttcaacttcgactacttcaagtacgcgagccttgcgcatccgaaacccgtgcgagtggtcgaggggccaacatcgacagcgtccaccagcagctcctccatctgaccgaactccggctcctggactcccctaacgccagcggcggcgacctcgcacggctcctcagcggtcccattggcgagcggctcaccttcatctcgatgtcggtcaagtgtctcgcccatcgccaggtcatcccggtcgttgcgagctttgagaatgtcgaggccttgcacttcgcgatcacgcggctctcggcgatcctccacgacctgacgctcttcaagacgctcgtcaagctgctctgccggcatcacctctctcccggcgcaaaggagggccgttacaccgctcgaggcctcgacaagcctcgacgtgtcgaggtcgatgtcgtcaccgacccggccaggcaggaggacggcagcggcgtgtcgctgcaagactttgacgagtcgcggacggggctcgctaagcacggcgtcgacctccatgtcgacgagatagtcccgacgaccgcctggcttcataatgcgaacatggtcaagtgatgctgctttcgtcgacgtggcgtgtagcaggttgcggccggctttgtgcgcgtacctcaaagggacagaccgtgaattcgctgcagcctgtttacaagcgacgttgggtacatcagtcgcgaatcctgaccgtcaatcgcccgctcggcagactgtatcgagtgctcttgtctcaaggcaagtgttgccgcctgagtacgggcggcgcgatgacaacgcgttgaggcttgcccgtctgcctgacctcgatcatcactccgtccctacccttcccgcccctcttgactactctcactcctagcgacaagggagctctccatcgaccccatcactatgtcttcccccggtccctcgagagttgggtcgcaaggcggaaaccgaccgtctggcagcgctgccggctcacgcgtcgccgccctccccgccgagcctccagcactggccacaacctctgccgaaccccagcagacccctcagcagtccaaaaagagcaggaagcgccgcaagcgggcagctagcaaggcaggctcctcgtcggcaggcccctcgacggcggcggtgagcggcggcggcaagcgcaagcggcttctggagctctctgaacctgcccgttccgacgacgacggcttcgaccctgaaagcaacgctgaggacgtcgctagcgtcgaagagttggcatcaagtccagaggagggcaagggcaagggaagggccgacaaaactggcaggagaggctcaaagcggtcgagatcgtcggtcgagcacgagcctgccgaggctgcgagtgaggccggcccctcgacaacctcgccgttctctgcctcggctcgcccgcctaccgaggaagcgtcggccggacggactcccacgaccgagactgacgaggccgaggtcgaggcaaacctggcggccggcctggaggctgcagctcccctgtcggctctcgctcttggactgcgcacggccgcgtcgcccgctcctcctggctcgccagcacggctaagtcgctcgtcacccgtcaagcccaaagccgtcttgccaattcagctaaaggagaagaagaaggcgtcgactgctgccccggcccctattgccactgtcgcgccttcgccagccaagccgtcggtcgaccctgcgctgcgcgagcgtgccgtccgcctgaagctcgtcgatgacctcgtcaaggagaagcgcgagcgcgaagaggaggtggccggattgcgggccgagatggatcagctccgcaaagaggtcggcttcaaggacacggtgcgtgaggcgcctcgattgaagctttggcgtcgactgactggtcgtcttcgacccacgcacaggctctcatgggcgagcgcgagaccctaacggtcgtcaagcagtctctgacgtgcagcatgtgagtcggcttgtccctaagtcctgcgccccgtcactgacagctcaatgtgcttctctccctccagctgcatggagctcctttaccagcctttcctgatctcgccatgcggccacacggcatgcttcacctggtgcgtcctacgctagcggtttcagccgatgaaccgactctgacagccttgcgcaaatttcatccagcctcaagtcgtggttcctctctccgcccctgggcccggacgacgagatatcacttccgccagcccggcagccgaagacgtgcccgtcctgtcgcggcccggtcatctcggccccgacgcccgtcttcctcatcaaggacctcgtccactcgatcggcccgacgctccggcttctcaacggcgaggacccagcaatgcctgccccgcgcgaggtcagcaccgaccgggacgtctgggacgggctgtttgatggccggccggccggcgagggcttgccaaagccgacgtgggatgaggaggaccgcacctggcgctgtcctgactgcttccacgaggtcgccgagggcgagtgtgtgagtcttgcacctctctgcttggtctgctgcaactcaggcgctgatccctctgcccactcagtctggctgcggcgcggtcttcgacgatcccgagtttggcggcagcgacaggtcggacaacggtggagaggacgacgacgagggcaacggcctccagctcggctacccaggcttggctcagtactttctcgacgaggacaacgaggaggaggagcagagcgagatggagggcttcatcgtcggatctgacgagggagaggaatctgagtcggtgagggcccgtcgctaccgtcgctccgctttcatcggtcaaagctgatctctgctgtatcatgcaccccaggaccactcgcgagacatcctctacgagctcggcgccagttcgcgcatgattcgcgtaagtcgacgaccagacccagggctccgcttggccctgccgttgctaacgatctcacctcctccactctcgcagcgcttcaagcttcaagtcgtcgacgatcaggtcatcgcccgcattacgaccgaggacccagagcacggcatcgtctttggcatccccttggaccagccgatcgagcgtgcgcgcgaagaccgcgacggcagccagtgggtcgctcagtacctcgacgacctcccggagggctcgctcgtcaaggcgctctgggtcgagcagaagcgtcagcgccggctccagttcccgacgatgcccgagtggcacctcgacgaagtggagtacgacgaagaggacgacgaagaggatgagggggagggggaggacaacgacgaggacgaggacgacctccagcagtacggcagcgacggcgacggtgacgagctgccggcggcctacatctcggacgacgacctcgagattgctcgcgagcacctccgtcagcagactgctgccctcgcagatgccgaggaccacgaggacgaggacgaggccgagatgagctttgcccctcggcgccgagcacgcggccgcatcgcgctcgactcggacgaggaggacgacgacgtcgaaaaggtccagcctagctcggacgacgacgaggacggctctgcggctcagacggcctcgagccagcgccggcgacacggcgaccgcatccactcatcgccctcgtcagtcgcttcctcgcaccgcggcgggccagccgcctacctcgtcgacgaagggtccgacaacgaccccgagacgcgtagcccgagcctcgtcgacgacgacgaggaccgggacgaggatgagggcgttgactttgactttgggcggttgaggcggcgggtggccgaggacgtctttggcggcggcgcgagcgacgacgacgagggcgaggatggccgtgaggaggaggatggcgaagaggtcgcgggctacggcttttacgacggagacgacagagacgacgacgacgaccaggaggagtgacacctcgagacgatttccaatgctgcctgctatcttcggtgccggcgggccgacaactgcaaggggcggtgcatgcaccggcacaacaagagatctatccgccgtgcaggtcgaggcggcgcgctacctctcgctctatgcggccagcagcaccgcacggcagcaacagcagtagcaaagctcatcacgtgagacggtcgaccatctgatcgttcaacttaggtcgcgcgggcctcgatcatctccctctcgcgccggccctttggtatccagctggcgaaagcggcaagaaggccgacgcacgcgcaaccgcccgtgaagacgatggtcgcgccccatcgcccctgctcgaggccaaaggcgcccttggcatcttggaagctcgagccggtcgaggcggcgaggagggcgtcggcgagggggccggcgacgagggagccagcgccttgggtcgcgacaaatattgagaagaggagaatcgactcggacgggtcgccttgggcgagcgtcgtgaaaccctggtaaaagctctcatagctcgccgcgacaaagccaaacgaaagcgcaaagacgacgacggcggcgtacgacgtgctgaagccccagagaaaaaacaccgagagctggggcgagagagagagatattcagtgctgctgcaaaggaggcgcgggggagcgagcctgactcacgatggccaccacagaggagaggcagacgccgatgttgagatgcctgtcggacactgcgagcagagagagaagggagaacagaggtcagctagcggacaacgacaagaaattttgcaaaaagtaaactcacgatagccgaacaccgggaatccgatagcgttcgacaggttcatcaacgacagagccagagtccccttgaacgagctctgaccgagcgccgaggtgacgaaagtgggaaggtagagcgcaggaaggaagctgaggatcgacaggaagtcgtcagcgatgctgcttgatggctcggccgcctgagctaacagccgcaccttccgcagccctgtatgctgctgacgactgaggacgaaagacacgtgcgtcagcagcctcgacaaagggcaaagaaaagagacgcccaggtcccgtaccgagcagaaaccagaacgatcgcttctgaacaaacttgaagctgacgcgccgatcaggcttgacctttggatcgcgatccttgaggaatggcgaggcggctaggatgaggacgacgaaagcgacagcgaggccccggagggttgtctggtagccaaatcgcgcgagggagcgctcgatgatcaggggtaagatgaaccccccgaggccggttccgctgaagatgatgccgacctggacgagccgtgagatagtgtcagttggtaggggatcgcagacgcgcatatgagggagagcagcccaaagaagctcactgcgagacccttgcgagcgtcaaaccaggaccaaaggaacgttgagactgcaggatcgggtgcgtcagcgactaagagatagaacaagggtgtcacaggtgagacctaccaggccagtactgtcagtcgaatgggaggagagagtcagagggtgtttgaggtcccccgctcagtcggtccagcgtgcacgacgcaccaggagcgagtttccgagcgccgtgatcaagccctgcgttgcgagcagctggagcggtgtcgttgcgaacgaggcgccgagcagaccgacgaccgtcatggcgaggccgaggtagaaggctggcttgcgccatgccgggaaggcgatggcgagcgacactggacagaagaccgcagacggcgtcagcgcgtgcgtccagggacgaacatcatgacggacgaacgaactagtcgggaagctcagcaagtagttgatggcgctgagcgagccgacgagcgggagcaacgaggaaggagcgtccttgaagacctcgcgctggtagtgctcgagccagacgccacccgacatgggcaggccgtagacgagcagctcaaggacgtacgacgctgcgaggtaggaccaggccgcgcggcctccgtcctgtgcatcaccatgcgggagggccgtcatcctcaggctacacgagcagtggacttggtaggcgagccagtggtcagacgtacgatgggaggcagctcggcggcgaactcgcgaggaagaggctgctgctgctcagcctcacccgaccgggtcggcgcggcagcgtcctgctgctgctcggcctcggacgacggccgcgggccagagacgaaaccgtgctctgaccggcggtgacgcgggcggtcgtcgagctccatgcaaggtagacagcgcggcggtcaaggatgaggggctgttgggagaggtcaaggcgaggtcggcgggaggtcggcggggcgagcgagatgatggtgagcagcgcttcggcggtttgcagcttttttgaaggaggagcctcagctgccgggcatactgtgctaccacgagtcttgcgatcccgctaaagcaggggttgggaacggacggccctgggctggccgtcgggacgggcctgcctggcgtcggccggtcgcgtcggccgaggaggggccgaaccgccgcaacgatgcccctcgaccgctgctgcatgagacggtcttcattgcaagcgacgcgagtgataaggagccatctgacatgctggagtcgttctctgctccgaggcatgctgctgctgctgggaggctcggagctcatcgacaggagcgcaaagttcccagagagcgacgagcgaatcggcgggcgggcggcagcggcgacggccgtgtcgaactgaccaagctgcacctcgcccttcgatcctccctcaccacccttctcctcgaccgtaggaaagcacacagcactctccgacccaccagcaactgtctctgtcttcgttcgaaagactctttctttaacgtcatcgtcggctcccttccgccgccgctccccaccaccgtcgcgccgccctcgccgccgctccccaccaccgtcgcgccgccctcgccgccgccgccgcccgctcgccctcgatgctccgcaacgccgtccgatctctcccatcgagctcgacgctcaagctcgctgccggcgccgcccgcaggagctacgtcgcctcgtcctcggtctcccatgcgacgccgagcagcagcagcggtgcgagctcgagcgtcgtcccgccgccggtggaccctgcggcttcgctcggttcgtcctctgcctgctctccacactgctcgtcctctcttcgcccagcagctgacctcgagctcttttgattctccagagtcgatgggcatggaagtcaagctggccgagactggcccgatcgagggcaccaacaaccggcccgtctacctcgacatgcaggtttgtggtgtcttcccctccctctgtgcccacactcgttcgtgttgagagccgaccctgtgcttctccgacatacaggcaacgacgccgatggacccgcgcgtgctcgactacatgatgccgatgtttaccgaacagtacggcaacccccactcacggacgcacgcttacggctgggaggctgaaaaggccgtggacctcgctcggcaggtgcgttccgccctcgccctcgccctcctgccgcttaggctgtcgtcggctcgctgcgaggcaggcaacgggcgcgtggctgcctgcttggaaggggaatcagggctgacctcaattgtcccgtcgctcgcttgtagaacgtcgcgagcctgatcggcgccgacgccaaagacatcgtcttcacgtcgggagcgaccgagagcaacaacatgatcatcaagggcatcgcccgcttctacggcggcaagcgcaaccacctgatcacgaccgtcactgtgcgtcatccggctgtggatgacaagcagctggcttacggtgctgacgaccgcttcccgcgctctttgcttccgcctctccccgtcgttggctcgcaggagcacaagtgcgtccttgactcgatgcgctacctctcggagaacggcttcgaggtcacctacatcccggtccagtcgaacggcctgatcgacatgaaggtgctcgaggcagcgatccggcccgagcagacggcgctcgtctcggtcatggccgtcaacaacgagatcggctgcgtccagccgctcgccgagattggcgccctctgccgcaagcacaagggcgtctactttcatacggacgccgctcaggcgctcggcaagattgagctcgacgtcgacgcaatgggcatcgacgtcatgtcggtcagcgcgcacaagatctacgggcccaagggcgtcggcgcggcctacgtccggcgccggccgcgcgtcagactcgagcccctcatccacggcggcggccaagagcgtgggcttcggagcgggacagtcccggcctcgctcgtcgctggctttggcgaggcctgccgaatcgcaaaggacgagatggcggccgaccacgagcgggtgacgacgctcgccaaccggctgattgagggcatcaacgcaaaggtgaccaacgtcgagcgcaacggcgacccggacggctaccctggctgcgtcaacctgtcgtttgccttcgtcgagggcgagtcgctcctgatggacctgaaggtgcggatcccctcaagagccgactcggtgtcgagccgttacttcagaccagtccgctgacttactccccccactcttccctcgctttaggacatcgccctttcgtctggctcggcctgcacgtcggcctcgctcgagccgtcatacgtccttcgtgcgctcggcgcgtctgaggacatggcccactcgtcgctccgcttcggcatcggccgcttcacgactgaggaggagattgactttgtcatctccaagattgtcggcgccgtcaaccggctgcgcgacatgagcccgctctgggagctccacaacgaaggcatcgacctttcgacgatcgactggagtcagcagtaggacccagcctagcgtcttctgctccctttctccctcccccgtctgaacgtgtgtgtaccaagacctacttcgtctttcgtgagcagctgggttgccttgtcgtctgccatggccggagactgctcgccttggaatgtgcgcgttggcaagacataaatcaggtcagagatgggcgcgcccgcaccagatggcgggcagctgtcgcaagagtgagagaaacagggccggccgagctagcggcgggggggagtctagagagagaaaggagagtagaaggcgcaagcgggtgccgctgaagtccgttcaaagcggtcccggccggaacaggcaggtagtgagaaaaaggtggcgccggcgaagagggaccggcaccatcgtgagagggtccgcccgctttaagcgaggattgctacgacaaagacgacgacgccgacgaggccagccgagaaggccgtcgtcgtccgcgagccagccgaggaagcggcagcggcggcgacagaggcagaggccgaaggcgaggcagcaccagcgctactggaggcggcggccatggctgaggtcgaaaaggccggctgctgccacatcgacgagagcctgtaaggggaggcgaagggagtcagcacgggcgcctccgagttgagacagggaagcgaggatgggaaacgcactgagcgtaaggcgtgaaagtcttgctcgggctgacgggcttcttcgcggcggcgcaggtttggacctgagaaggcagcgcgggaagagaggcaggggtcagcgccgtcctaccgaccagtatgcccaagcgggaggagaaagggctcaccagagtcgaggccgttgcctgcagttgcacatactgagaagcagtgaacatcgagtactcgaacgcacagttggcgcacgtgacaaacgaatcatagtttgagccctcgcagatgtcgaggcagcggttgtcggcctcgagacagtagccgtaggtgacgagtgtcgacgagcaggtcgcgttgcacgcggccgggatgaccgcgccgccggggagcgtcgtcccgttcgtcgtcccgttcgtcgtcccgttcgtcgtcggggcgtcggcgcgggcaacaatgttggtgaaggggtgcgtcggcactggaggcgaggtatataggcaggtcagcgacggtggcgaagaatgaaaagcggaggcaagacacgcttggacagctcgccggctggactcacgggccgaagcgaccgaggcgacggaggcgagggcgatgacggaaagcagcgaagcgagcatcttgggaaagtaaggtgggctgaagggcgagggaaaaaaggcgaggagagagggaggtggccgggcgggagagagaggagggagaaagggaacaaaagggaagaagagcgaggtcgtcgttgggggtaagccgaggttgttgagccaacaaggcgagctcaaaggcccgcgagccggaacccagcccgcgtgcgacccacccatccactaaccttggcggagaccgagcgcgataggttttaagggtgcgagaagacagcgccagagcgaggaggaaccggtcgtgtgggcggcctggaggggcgaaaagggggtccggccggattgagacgggcgggcccggaaatgagcgatcgaaacgaccggcggcggctccgccaccaatcgcccagctcggccgggctgagccggacaacctcaacgccaggccagctctacgagcgacctatccagcggggtgaagctggaggcggcaaccgcttccctcgacctgcgccgcaagcccgagcgaaggaagcggcttcgagggcgtagagagcgaccggccgggacgatcgaccgcgcgcccgcgcaccgattggccttcccaagagggcaggtgcatgcgccgccgcccgggctctaaacctgatcgagggtgtcgagcaactctttcgggcaagaacgattccgacgccggtcagcgctcgatgagagtggcggtgcgagtggccgaagcgtacgtaccagacctctacagggcgagtgagcacttgagcgagcaagagcgagacggcccgcgcctgagcgaggcatgccgtcagccgtgcccgggctcgactgcgacaagtcggacgaagcgctcccagcgacgcatgatgggcaggacgacgtcctcccattcgcggccagacgccagacgcgggagcgggaagagctcctgatggaccttctgcaagggcgacgccaatcagaggtcagcgtcagcgtcagcctgggcagggtgggcagggggcgcgcgaggggcgaaacgcaccttgcagtcgatgcacacctcctttgtccgcttggcctttaccatcccgccaatctcgagatggacaagccgctccagccgtcccgcgcccggcatcccctccccgccaacgcgccggacccccctcatcctcgcgccgtccgccccgtcgccgagctccaccgaagtcgggacgacgccgagcaggagcgggtcgtgcgaagggcattgcttcgcccactgatcgagtcgcgcgatcgggttgcgcgaaaggccaaccttgaacattctcgagtcgatcgtttggaggcctgccgaccgaccagatcgcctcaggtcagcggacgactcgagttgaggaggagagaagaggagggaaggaacacaccgcggtactcgaacgcatagacgaacccccgctcgcccttgtcaaacagcgtcaacggccgctccatctcgaccctcagcccgacttgcgcgccgcgctcgaggtaagtcggtatccaatcctcaaagaggacatacgtcctcccaccgccggcgagatagaagccgacctcgtcgaggatgatggccgaatggacgtggcagaagtcgctcgtgacgtcgccgtcgaccgacttgagcttattgcggcaccgcgcgcccttttgcgtggagccggcgcactggcgagaagcggagggcgagccgtcggtcccggcggggctgttcagcgccggcaaggccgttgcgctcaagggagggcttctatgaggtgtgctaggcgcaacggggttgggagtcaccgaggggacgagggacggcgggtgggctgctgcaggctgagctgcggtgggcgcgagccagtgctgcggccgaactgctgcatcggccgatggatgaacggcgtatgcgctgggcataggagaacgtgtataaggcgatgcgacggcagcagggtggtgctggtggtagtagggctgcgcacagtagggctcatgcggcggtagcggtactggccatgacgggtgttgcccagctgcagaaccgtaggctactggcccagccggcgagtaggccggctgcgagcgcgagcgcgccgggtgctgatagtggaccggtcggtagggggaggctgatgacagcggcggcggacgaggagtcggcaggggctgctgcggatgacggtcaacaggcctcgttgcccaaggcagaccttgatggccagcaggcccaggcgagaccgggtcaaagactgagtagtctggtggtgccgatgccgacgacggcgaagcgatggccgcccgaggcggagcggccggcggttggtgaggttggttacgggaggaggaggcggagtgcgcgacgaaacgggcgttgaggagctccttgcgcgtcggtccggcgggggctgaagcacaggcaggtgcgctggtagagtgacgatggccagtaggtgttggggggaccactaccgggccaagcgactcctgaccgcctggacgagagatggcaggtgcagtcccacgcgccggagggagcggcaagccgaaccctggcgtgggccggtcaccttgcccgtcagccgccctcttcttcccgccggtccctgcctgaccatagcgatggcctgaacattctggggactcgcccgagctgccgccggctggaggcgggggcgacggcaagggcttgtcgacgaaggcagctgggtgcgcttcgaccggtccgggacgagtcggcggcgcgtcggcgaggtcgagttgcctgaaggcccgctcgagggagcgctccatcggcgaccgatacagctcgcgagagcactgtagaggccttagcaagcttcttgccggtctccttgtgcgaggtctcgctaaggaggcaagactgtcgggggtcgtcgtcttcagctcgtctcgaaagcacacgcgcgcgcgtccgaggtcgagggagagcgcgcaagccctgtcctccgagcgactacgacccccttccttcgtccgccagccgacaaagcttcggagagcagcatgtgtaggtctcgatccattacaggatgacccctgtggccgcaagggactgaccctcgggtccgtctctgtcgcttcgaagccggcatctcgcgtacccgtctggccgaggagcgcaagcagtggcgcaaggaccaccctttcgtccgtccccgccggccgacactcgccgagtcgagcagagtcctaccgggctggaagactgaacggctaatcgtacttgcctgcagggtttctacgcccggccggccaagtcggccgacggctcactcgacctgatgaagtgggaggtcggaatcccgggcaagccaaacgtacgtcctccctctcggtcatttcgccagcaaatggaaccgctagcaaggacatgcaggtgaagagaggtctgccacagctgtcgtagctggcactgctcgacccgagcttgcgggagaggagcttttgcgacaccgaccgagctctcttggcccgcagctcgcacgacctccgaggatcggcaggcagtggtactcagctggtcgatgctcaacagctgactcgcatacccccgccctgcagacgaactgggagggcggcctctacaagctgcagatgatctttcctgacggtgcgtcagttgagagaccccgcccgctttagctggccgggggaggcctgcgcgcaagccgacacgccgcttactcccccttctcctccagactacccatccaagccgcccaagtgcaagttcaccccgccgctcttccacccgaacgtctacccgtcagggaccgtctgcctctcgattcttgacgaggagaagtcgtggaagccggccattacgatcaagcagatcctgattggcgtccaggagcttctcgacgcgccgaacgcgagtgacccggcccaggtcgaggcttacacgctgttttcgtgcgtcccattcgacgagttgagatcgtccctgggagggcgagggtcctgacttgctgatgtggcgtcgcaggaacgacaaggtggcgtacgagaagcggatccggcaacaggcgcggggtgcgtcttctccctcggtcctgcgctgctctgccggcgagactcctcctcttgaccctaacaattttttcggccttctcgcagaatgtgcgcaggcttgaggcaatccttgtcgacaagcggccgagccgagcccgagctggccgctccggtgtcaagagacgaaaagcacgacgacggcgaggagcaggggcggtgtgcttggcgtgcaggctcgaggccagcagcgagtcgagattctcgagggagcgtcagcttcgagacagacgaaggtgctagagagcgaggctctattcccatgcggccaattctttcagaaggcgtcaaccggcagggcaacaagcagccgtcattgatacagtccctccgccttcgtccccggatcggatcgctactttccctcccccccccgccccccatgcctcatgcatgcccaagccgggccgtcttctggagctcctcggcccggaaaacagcctcaacgtcgtccttgacgtgctccttctcgtcgtcgacgtccgagctgctcctgccagccgaggacgagaggtcgctgtcgatagcaagggctgagggcctccggccaaagagccgggccttgtgcttgaagccgaggatgaggccgatccagagaactgtcacgtcgtgcgagagcggtcgattaggtcgagcccacggggggttgacgagggagggggcacaaacgcactctgcagcgagaggaggcagacagagaagataagaccgggccgggcggctgggtagtttgtcgtccgccagaccgtcaggttctcccagacctgcatcactgtcgagggtcagagcgcgaaaggtcggctctatttgtcagagacgggacacaatcgaggaagaacgagaggacgcacggtacgcaaagtcgtttgcggcagctaccgcgatggcccgctcctcttggtcgctcgagcagagtctggaaggggcgattccgtctgacgtcagctttagtgcgtcgaagggtgcgacgagactcggcggccgcactcgttgatccaggtcaagatcaggcccgactggccggtcaagcagccaaagctgtctgtagaaacggagagcggtccatgtcagccatctcgaaagcacgacctccaacgagacgagaacctacagaagagatctggccagaggggacggatcaagtagagtcagcgccctgcagccaagccaaaccaagtggcaagagaggacgaacagaagtggagcttcgtgtgtgcaaagaccgggatggcgacgagcgtgatggccgaagagagcgcccaggtactgctgacaatctgaagcggccagcgccggcctcgaagaacgccgtccgagatccaggccatggagagggcgcagatgacagcgacgccggctgtaaagagaagactgagtcaattgatggacggcgttctggcttgagtagagtggtcgacgcactcgttggcagaggactggagcgccaaagggggtcagcgtagtcaactcggaggtgcgcgcggagagggacggactagtggtttatttgagggatggtgtagactcgcggctggcccggcttgttccatgctttgagccaaaagggcatgatggagcccaccccgctcgctgcgttgttccagaatgcgtacagaggaggaagaaccctgcgtcgtgaggtgagggtgttcagctagcaattggttacgagagcgatacgtcaacaagggccgcaccagatcttccagccgccaaggatgcgtttgaccttgatcttcgaccacggctcggagggcttgcggccctggactctggatgggcaaaaggggcaatttgcgcgtgggagtcagttactggtctgcgctgcaaaagaaaggggtaaggaccgactccatgcgcagctgggcgagggcaatgtcccgctcagtccagatccagctcttggtcatcttctggggcagattgggcagctgtaaagaaaagaggcgcattgcagccgtcagttccatgaaggacggcaaggtgcgcctcctgaccacacacaaagacgaagccggcgagggcgatcggtacgccaatgagaaagttaacgaggaagagccagcgccatctgcaggagagcgaaatgacgtggtcagcgcgccattccggctcggcccagatcgtggacacgcacccggccagcccgttgaccccatcaaggctcgtgtagacggccgcctgaaggacgccgctgaagaggttgccgatcgcgccagacgtgtggaggatgatagcccgcttggcaatttcgtccgagcgatacatgccaccgaccaggaattgaatgccctgggaaagtcgaaggaaggtcagctcgggccgcaccgaaaggatggccaagtgccgcttacggggtagaagctgtagcggcgatgcgacatcacgtaagcgacaagggcagacgatcggcaggtagacacgcaggtacgcacgacgactcgaagagtccaatgaagaaccgcagaaggtagaccgagttgacgtgccggacgccgtacatgccgactacagagacaaggcagtcagcaggtgcgggaatcctgacgcgatcgagaggcgacatacgggtgcagagggtccaagcgagctcgcagaacggcagccagcgccctggattgactctggtgagaagcagattggaggggatctggccgatgacctgaggaggggaaggagggggcaggtcagtggccgcggcaaaagggcggacggcaagaaggcaaggacgcacgtagccggccgtgtacagcgcctttgcgttcgatagctcgtcgccaaacatgcccatgtcctccttcatgccactgacaaaggctgcgaggcaagagaggtcagccgtcgcttcagaatgccagctggcacaaagggctaaccgttctggatgttgttctcctgcaagaggcttgggaaagatcagagactgcaaagattgataaggctagcgaggaaaattacgtacatccaggatcttgactgcagggcttacaaggatgtcagcgagcggcacgaggagagttgtagcgaagcgactgacgaaagtagctgcaaaaggaagcccagggtgtcagacgatgatgcatgaggatagattgaataaagacgaaccctagagacgccaaagtgacctgcgaatggaggcgagaccgcaacgtgcgggtcagatggcgtcggatcagacggacaagccgagaggacaaacgacgcaggcgtccagcttaaacatgaagcggcgctcggttgggtccttgtcaatcgtgtcccatatctggcttcgccaggtccggacaacctccgtcttgacgacgtcgtcctctcggagctcttgcttgattacctcgatccgggcgagtgtcgcttcgtcgggcgcgcggccggtgaagaaggtcccgagccgggtagccatggcggaggtgatggagagcggcaggcgcgtaagggctagatggggaggatcaagccggctgtgcgtccgaagtttgagagagacgatggaaggggacgagctgcgagatgaagacggtcgtccagccccggcgccatcaacctttgaaggtcagccctccggtcagcgcgatgtcgtgcaaacaccggggattaggccggtccctcctcctatcagagagctgagcaggtcggagcaagccaggacctgttgaaaggcgcagcggcgtccgtggatggcgagcttccgcccggagccgggaaagaagaaaaataataaagcccggcgcaccctcgatgaagaagcgccatcgcacgcagcattgaggcgaccaacggacagcgcgagagctgcaggcatgtcgtactttgacgccagatgaacggcgttttagcaagagcaacgtcgatagggcgaagacggcatcgacgggacgcagatgcgctgcacggcgagcagaggagaatgaggagcgtccatgatcagagcatgacgagaccgacgcccgaggtgcccgaccggtcggccgggaagccgcccgaaaccttggccgtccgccaattgtagaggtagtagttgaggtagccgctccccggaccaaacttctgatcgtcgaggaagctgctgttgtcgagcatcgtgagcgagttcatgacgtcaaagtcggcctgcgcaggagaaggggtaggcgtgcgtgcaaagtgagcctctgattagacggtcgaagtctaaaggagaggcaggcgtcggacgtaccgccttggcctcgatgagcaggtccttcatcagcgcccgcagccgctgctccttgcgcgccgcgagctcgctctcctcgtcggcgctgctcccactcgcgacctcggagctcgcagtcggcgcgagcgcggcctcggtcgcatagtaaaacgtgtaggcggcgttgaggatcgagtgcttggcattgttgaggatcgaggacgggagcgagtagaacgacatgacgtcggtgatcttgcccgactcggggtcctgcaacggcgaccgacaaaggtcagccgcagcccgacgagatcaacccaggagagcgagcggacgcacttcgacgacgtagacaaacgtcacctggtccttccgccggcccttgccggccccgttcgcgcccttctccccctttcctcgcccgctcaggagccagtgctcgacctcccgcgcgtcgtactctggcgaaatatcgaaccgtttgaggtagcgcccgagcaggctcgacacctgcggcagatccttgaccttcatctcgcgccagccaggcgtcagcgccgccggcgggagcgcgagcgacttggtgaagcgcgcgagcgtctgaccacgcgggacgtaggcaaagccaatgtcgatcagcttgggggcgttgagcgtccggtggtagtagcgcgagacggcgaccggcgtcgggaggacgacgccggccgtgtagacggcctggaagacgccgtggaggttgcaccggcgtgtcacctccttgatgaggacgggtgcgagccgctttgagcgtagcttcttgtggacgacgagaaagttgatctcggacgagttgaggaggctgccgccgggggttcgtcagcagccgcgctctcgaggaggaccgagggggaaaaggacgcactttgtccgggcccggagcgagacggggatgcctgagatgaaggcgacgagcttgcccgtgctcttgacccggacgccgacctgccagtccttgacgtagcccggcggtttgagggccctgagagcgcagctcactcgttcgtcagtacaatgcgacggagaagcgtcgaaaagggtgacgcaccagtcgaggaactctgcagagtagttgaagcgcatcgtcgcctcctggtcctcgacgtagttgtacgtcagcagctcatagagctccttgatctggccagcgtcctcgacgtcaatcgtgtcccacgtaaagtcgctcggaagcgggtacggcgtctggcggatgtcgctctttgaccggggggctagaaggcgcagggacttgcgtcaggaagcggtgtcgcgagcgaggacgctgcgaaaggtctctgcgtggaggaacgaacggtcgatgggcccgtccgggatcgtctcgctagagagcgcttccttcgcctggacgaccggttgcgtcttccagaactgggcgtaacagaggggtccaagccgagttggtcagtttcagaggggaccgcgcgggcgtgcagcggaagaccagcggcctaagctccagaagacgcaccttgtgctcgccgaggtcctttttgctgcccgtgtcgcccatcttgagctttgacgcgtcaccgccggacttgaggaagtccatcagcttcattgcctgaaggcctttgcggacctcttcctcgttgactgcgaggcggggggaacgggtagggacggaaaaggaatcaagggggggagaatgaagagcagcagcagcgtcagcgagcaagcccgcctgcgtctcaggcagcgagagagaccagcactgccgccttcaaccgcgcagggagggtcggctccggggaaggggaggacgcacgctgctccttgtctgccccttcgggcagcttgctaacctcctccatgaccttgtccatgacggcgtcggggatctcctggttgcccggaacgagggacctgcagatatgggcaagagagagaagcagtcagccgactgcatgctggtgagagagctgcctaccggtccagactgagcagcgactcgaggaccgagcgcggccctgccctgccccctccctccttcaagatacgaagtcagaggacgtacttgagcgccgaagcgaccttctttcccttgctcttcttcttcttcttcttcttcttctcgccctcggccaggcctgaggccgagcccgcagccgcgatcgagctcccggcagtaggcattggctcgtcgtcctcgtcgtcgtcgtccgagccgtcggcagcgtcggtcggcttgaggtctggcgcgccagaggcgacgagctcttggacggtcgtctgcccgtctgctttgccgggctgggagggggcggacatggcagcaagagaaggagatgatggttgacgggcgggcaggagcgaacctcgacctcgagtcgtccaccccttccgagccatcaacgacgacctccttccgtcccctcagctcggaccccagctgcagccagccaggtgccatgtcgtcccagccagaagcctcgacctcccgtctgctaccggcctcgccagcagcaacgtcgacgccacgcgcgtcgtcctcgtccgcgtcgtcgtcgcgtctccagctcgcccggcaggccgccctcagccagtcgtcagcaggcggcgacaagcacacgcaggcgctcgtcagggcttcgcagaacaggacgaccgccggaggccgttcgctcgaccggcaggtgatccttgaggtgcgtcctacctttaacccgctgcccccgaccgatcgaccgaccgaccactgatgccatccacccaccggcccccgcgctactgtaggaggacgactacgccgaggcgctcgaccgcatcatcaagcgcgacttcttcccggagctcgccaggctcgatgcgacgaacgagtacctcgccgcggtcgaggcgatggacgagggccggctcgagcagagcgtccgggccttgtgggagatcgagggcgagacgggcgagacgccacggttccgtgcgccctaactgctgcttctccccccgccggaacgacctcgagcccggcactgacgagaatgatctctctgcgtacagccgggggtcgccaatctgagacgcccgtcccgttcgaccgacctcggcggaaagcgatcccctcgtcggcctcgacgatcgcccgcgcagcccacctgccgacgctcgacaagttccaagcgcgccacacatccgaggacaacgcgtccttcacgtcgatcctctcgtccgaaaacagtgcgcgcaagaccaagatgggctgggcgtatgcgcaggaggaggccgtgcggaaaagggtcgaggcggccgaggggaagtggcgacgcttgctcgaggacgtcccgagaagcaaggacgagcgcgagcggatggtcgaggcggcgagggtccgcgagcggctgcgaatttcgggcccggcgggtctggacgacctaaagggcagaggcaaggcgcgggagatcctggccccgccgtcgctggcagcggtggcggcgggcgaggcgtccccgtcctcctcttcctcgatggtcgtcgctgccgccgacgccaatagcgaggctctcgtgtgctcaacgacgacggacggtctcccgcatcgccagccgctctctccacctctcccgccgaccgacctgccgctcgctaccgactcgcacctcgccgttgcgcttcgctcggccggcctcccagcgacgcgaacagatgacgccgcactggcggcgcatgacgagcgctcggcgacgatcgctgccagggcaaagaaggaagagaccaatgcagtcgtcgatgcttggccttggaaggtgcattccgtcgacctgtcccactggacgtgccgaagctgacgcgcgcctccttgtgtcctgcaggcccgcaactcgctcatgttcccacccgacgtcgacgtctcgccgcacgatctaccgctcccctcctcttcctcctccctccctaccgggccgccgcgcgagatcaagcacgacgcgacgcgccttccagacgacttcgcctactcggctgcggaccggcgttcgatgagcggcgctgcaagcagcgtcagcggaaacagcccgacacgcagcgaggtggcggccgccatatctggaacgacctgtttgtcctttcgccttccctcgtcctccctcgttgagactgacgcgcctctcgcccttcaaaaagatcatcgagcagggacgtcagcgactccccggccccacgtcggcgcctaccctctcgtcgcgcccctcccttcgccaacggcctcctccctcggtccggcacgcatctccgagctgctcacgtggggcacgctcctctctacgcctcgggcgctcgaaggagggaacgtcggaggctggacgatcaagccgccctcgaagcgcgacgagctcggccggaagctcgcgggccagagcgcaaagtcggtgatgacggcctcaccctcgctgtccgcgtcgtccaagcgacagagactggacggcactgccttcgggccgggcggagggctcatgctgcccccttcgagtacgatgaccggccgcaagacgctcgcaggcatgtcgcctgccgcgcgcggtctctccgagcgcataaagacgtcctccggctcccttacacctcgcgcctcctcctcgtcgtcgttcgtcaccggtcggagcagcggcggcgggcggcagcgaggtgaggcgatggagcgagcggccgcttggacagggacgaaggggacgacgtcagtcgtcgacctcggccggcggcggtggagcgagagtccgagccctcgcgtctcgcgggcaaaggagtgaacgatgcccctgtctatctcgcgctttcattcattggcagcaaggcgatggtttcaggaacgcggcgtgaggagaacggctggctttccaaaaggaaggatgcccgaccccctgccgcaactgtctcgcctcatccctcgcctctatgctcttcctccccgacggtcgccaagaggaagcaaacgtcttctgtcgtgagaagaggacggaccatcgtgagagggatagcatatgagacgaccgcacgagaccaagagattcgtgcagctgacgaagagggaagagggcaggccgttgtatgaagagaagcaagggacgaacgggagggaggcggtcggtcgacaggcggatcgccttgcggctgcttccgccgagcgaagcagcggtcgacgcggtcaagcttaggggacacaggcacccttggtgcccgtcaggcccgggccgaaacgccgctggtcgccgcaggcaaaggagaggcttcagagcgctgagggcgacatcgctggttgagcacgagagggatggaactcaatccatgccggccggtgcctcttcgacgacgggtgcgacgggctgttgcaacggcgtctcgtcaatggtcgcgctggagaaggtgcgacggcggaagtcagcatttgccgatggcacgacagaccttcaacgcatgacgggcagcgacgcacaaagacagctgaagcctgccgccagctttgatcgagactgggggcgcctgaatgccgtagcggcagccgccacacgaatcaagcccgctcatcgcgtcaacgcactgcgcgaacgagcgtcgagggcattcaggacgcggcgatcacagcaaggcagcgattatgggcgcacctcgtagccgtcatcggtgccatagattttgccagccgtcagacccgaagggcagagcgtcgaaacggccgccggcttggacaaacagcgccgaatgtgccccaagcctgggcggcaggcgtatgaaagaagatcattcttgggttgccggggtcgcactggactctgctggtggcaatgaagtcgtcggcgccataacaaccccactgtgcgttcgcgaatgaataacttttctaaacaaccatgtttgcctgcgagtgaaggcggcgaactgtcccagtaggtgacgaaaagtgaagttggcgacaagcgacctgcccttggcgctgtgagctgggcacactcggcgatagagtttctggtaccgaaattgcgataaccgggcaagttggcgctcttaaggtcgcctaagacgagatagaacaagcgatttagtaagtctgtgcagattggcggtgtcagagggacagagcacgagaagttcaaggctctcaccggagcaggctacgccggtaaagctgctcttagggaaaggcttgccagggcacgtctctccaagatcgtcgccacaggtgacgccggtgtgggtcgatccgggtacagcgaaggcgagcagggcaagcagaccaagcgcgaggccgagtctggcgagaggggcgacgtgtgaaaggagacgaggacgaggcgttcttgttctttgtgtgcctcgtttcaggcccctttgcgggatgaaacgcatggcgcgcttgtgagagcgacggtctgcgcagcaatgctcgtgagcaaagctgccttgtaggtcgtcgcggggcctgccttggaaccgagcgagatgagcgaatgctctggcactgcttgacatgatagcaggcacgagggtggcttgatgaaaacagggatgaggcgcaagtgaaagacgactttgagcggtcgccttgagctcgctcggtggcagcgtcgacgtcggcgtctcgagaaggaaggggggaatcagggagcagatagagtggtatgcgctacaggagcgtgagggagaaggtcgagaaaggagtcgaggatgaatgccagcaggccgttgaagggtctcggtgacgaagcggggacgggcgagggcagactgccattagagctttgccttcaatgccttgccgccgtcgaccgaggggacgatcatcgctgcgagccggcccgtgatgatctcctctgcctcgcgctcgattcgatccagcagcgtctcgcacgtcggcacgtcctcgatgaggccgacacagacgcccgccgaccagacgccggcgtcgacatcgcccgtctcgtacaccttcctgccccttgcgccactgacgagctcccggagctcctcgaactttgccccgccaggccgccgttcgagccggacgacctcgtccgcgaccttgttcttgaagacgcgggccgtgttgttgagcgtgcgaaagatgtgagtcgtgtctgcctcagtggccgagacgatcgcctgcttgatgttgtcgtggatgggtgactcgaccgtgcacatgaacctggtgcctgtgacatgataagtcgagtaggaagtcagcgggagggtgagtagctgcaggtcaggacgagggcgtacccatgttgacgccggcggctccgagtgagagtgcggcgacgaggccgcgctagaaggcgtcaaaaggcggtcgaacagggaatcagtggacagtaacggcgaagggcgacgctggcgcctgctcgtcgagaggaaggagcaagggcgtaccgcgtctgcgaagccacccgaggcaatgaacggcaccttgcagctcatcgccgccctcgcgagcagaacgaggcctccaacatccttctcacctgggtgaccggcgcactcgaagccgtcaattgagagcatgtcgacgccgagccttgagcggcagaggggcttgtcagcatcggtagcaaggcaggggcggaggagaatgaagcacaggacgcaccgctcggcgctgagcgcgtgtcggatctgcgtcagcttgtgaatgacgtagcagcctggttcgtccgcattgagcgtgagagaaggggaggtcagcgacaggtgggccgagctgaagccgggcaagggagagaccgagcgcgcaccctccttcttgaggtaggcgatcagctcgcccgggttgttgcccgccgtctcaaagaccctgacgccctcgccaaccgcagcctgcgcatactcggcgtaaggtggcgggttgattgacgggaggagcgtgatgttgacgccgaagggcttgtcggtcagctccttcgtgcggcggatggcctggcggaggtcggccggtgtgggctgggtgagagccgtcaagatgccgaggccaccggcgttagacacggcggcggcgagctccgggacgccgacccattgcattccgcctgtagtggggacgcacaaggcgtcagctctgcgatggcgagacaacggagcacaggaggcagggtcggagggaggtgggcaggtcctccagtcggacgcgggcggcgggacgcaccctggacgacgggcacgcggatgccgagtgccttggtcaaagccgtctcgatcatggttgctggttgcgttgtagaaggggggagcgatcagatatgagcaggctcgaggtgatgtttgagcagcaggaggaggcggtagcttgaaggtcgggctggctggctggcacgcgcgcaggcgccctgcttcggccgggccgctcgattgccgggccgagtgatcaaacactccacccgactgtaacgcgtcacagtcgaatcacagtcgatcgacgacctcggcctccgccgccgtcgagcaccagacgccaaccttgtcgtccgactctctctctctctcgccagacgatcatcccgacataaaagagcaaggcccagcgcgagcggatacaggacgcagacctcgtgaaagactcgcagccagcgctcgtcacggacacgccggctgcctcaacctccagccctcgcccttcccctcccgctcccgcgctcgtcatcccaccctaccatcccggtcgccctcggttccgacccgacgaccgcaacacaatcgaagctatcctcgtctgatctccctcagccctctatcttggtccgatcaccctactgggagcccgcccacgatgggacagcagcactcgtccaacggcgcacggacaggcaacgtcggcctccaggtcggctcgatctcgatcggcctctttggcttcatcctcgccggcgtggccctgatcgtctgcgccgtcatcgcttgcgtacgtcctcgtgtgtgagcgggtgaatggtgggagctgctgtccgtgttgacggcaggcagggtggctcctcgctccttgacgggcacgctgctgccgctgccactcctagacacgtcgcatcgaaccagagctgacttgcttgccttcctcctcctcctgccagtgctcaacccctcgcttccgccggtccttcatcgactcgcctctcaaccccaaccggccgccaccctcccgctcccagccgcaccacccgacccgttcgaaccgcgagagcgccgtccgcgcgctcaacggcgaacacccttggttcgaagacccgttcgtccggctcgcgcgcgagcggcgggagctcgacacgtggcgaagggcggtcagcgaagaggagcgtgtattgaggacacgaccgaagatgttcgagcggcagatcgacggcgaccagggtcggccagcgggagaggacgacttgccggcgacacggcagcagcgacagcagcagcggctgccgcttggagccttcctcgtccggcctccttcctctttggacagcatcggcccgaccagtcctagaccaacacgcgcgattgttcaaacggccgtcctcattcggctgccatgcgcggcgtcagcagcagccgcggtggcggcggcagcggcatttaacgagaaggttgccctgcaagcgcaggcgtcaacagtcgcggtagatgacgccggcgacccgcttgatgacgacgagctcgagcaggaggagctgcctgaactcgagtttgggctcgcttacctcgagcttgagggcgagtggccatgaacattggcctttcaggaatcgacagggacttgcctcgccggccctctcttccctccgaatcttcaagctgattccccgaggcgagaggatgtgctcagctggcactcgccacctaggaggcctctcgatgggcaacctgacgtccaggcgctcgttggccggccgatcgaagcggcccgagcaagggggcgcccgcacctgtcagcgtagacacaggcaagggccgcaaaccgacccgttgacaccgattctcggtcggtcggcgagggccagatcgcacggacacgtctgccggccctctgaaggggtctaccgatctagctgcggccgtcgctctcgagtaaggcgcccgtcaagtcgctagcggtagttgtcgctcatgctgccagactgctcgcgccttcgagcttcttcgctcaattggctctggtcgctggcggggcagataattggtcttccatgaaagcgtgggttagaggtacaaagtgcggcagggagataaaccggatgagaaggtggatgcagacacagagtcgggggatgtgtgagcagggcgattccaagggatttcagacgaggccgatcgcgagggcgagggccgccgtcgcgccgagcacaaccgacccgtcgacagcggccacgcggccaaacgcgcccgagccagcgttcccgcttccgccgcccgtcgcgctcgctccgccgctgacgccggccgccgcgcctccgccggtgctctggccggtcgtcgcgagctttggcgaggccgagagcgggccggacgaggcgatgtaggaccacatggcgatcgggtcgtcgtagaacgcctgcgtcatgccgatcgtcgagccggctgcaaaaacgggaacgagaagggcgctgtcgagtcagtccctcgagcaatcgctcggcatgcgaggagaagaggggagacggaccgggcgagctcgagtattgaatgaactggtcggtcgtgccagggacgaggtggccgcgccaggcaaaaccgacgacggcgtcggccagcatcggcggcggcgcctcggggtcgttggtgagcgcgtcgatcgtgagctcctggtagacgccggtcgaggtgagggcttggccggcctcctgcgaacgcaaagaaagggtgaaagtcagccgccgccagcagacacaggcggtgcaagagagaaaggatggccgcacaaattgctggaactcggtctgctcgcccggccgtgagtggacgacgaccgtctggacgttgaggtagcggacgaggtagtttgtaaaagtcgcgcaggccgagccgcagaggccgtctccaaagatgacgacgttggccgggttgaaggttgtcgtcgcgaggtacgtcgttgggagcgtgtcgcggaggctacgaagggcaagcgcaaggcatcaggctctgccagatgaaagagcggataaaagaggacgcacatgttcgagacgggcagcccggcgccgttgattgttatgttgcgcgcgctgctgaagtagttgccgctcgaggtcgttagcgcccggccatccgcactccggaagttgctcggcccatagtagccagccgagttcctcgtcttgcccgcgtccgtcagatgcgcgttgaggcatttccgggcgagcggcgtgtcgcgcatgacgccggagaagttgatgtcgccgagcaggttcgaaggagcgaaaaaagactgccagaccatgctgagcgcgatcgagccgccgccgttgccggttgtgtcgatgatgatctgctcgacgccagctcgggtaaagttctgggatagagggcgggcagatcagtagcagggcgcttcgttgagagcagagtggtgacgcacgcgaaagccggcattggtgtcggtcaagaagtcgttcgtgcagccggtgtcggggctgaaagtagcgagctggagagaggaagaagcgtttcatcagccgatatccttcgctcgctgaatcgttgccagctcgtacccagacgacgccgaccggctttgcgtttgagccgttagcaggcaggataaagaactggatgtcgctgccgccaatgtaggcggcgttccggcgagggtcgcgcggcgtcgtgacataaggctgtacaagtcgagccaacggcgatcagctgagttggcacgagtgaaaggaggagggcaacaagggaggagacctacgccacgcgtccggtcgcactggctcgccgacgacgtctgtcgcttccagcccgcccggcgtccgacgagcccaacctcctcggggaaaagcgcgagcgggttccgctcggccgccgacagctcggcctcgacggcaaacgagccgaggtcggccgctgaggccgaggacgcacctgcggcgaggcagttgttggtcttaaaggtcgcggcgttggtgtacttatattttgagacgcggcgggcgacgtaggggatctggcaagaggtggcgggtgactgacagtcagcctatggtagacggcccaggattcgcacagtcgttcgcgaacgcacgacgtagtcctggccgccgatcgtgtacgtgatgttgtcgcggtccggccacgtctgctgcgcgaccgacccgagtgtcctggccgtctcgagcccgaccagactcctgcctgcgagcgcattcgtccgacgggcctggagcgactggtacgtccctgcgtcgttggcaatttcgtcgatccggtcccaagggggcttgccgtcgatcgcggtgatctccttgccggcgaggaaagcggcgtcgagcccgagaccgctgtagtaatccttaatgtagaagtactagcgaaagagggagagacgtgagaggcgggtcagaaggtttggcggacgcacacgctgccagaagacaagctcccacctcgtcgtactggttgatgatcgactctgcgtcgttggcgacgtagaccttgccggccgtcgtcgacgccgggtccgagacgaacgagacgggcgggaacgggttgaacgagacgaaggccgagccaaagcagtcgctgacgtagtagtggcctttgggagaggggcgacgccggtcggtcagctccaagagttcgagaggcggggaggctggaagagcgcgcgcggacgagaggcttaccatcgttcagcgagtccatcacccgcgagaggtcgcgcgagaaggcatagtcagagtcgtacgattggcccgcgatgcgagcgagctcggccctgtggagttgaacgatcgtttcagttgtgcgtgcagcggaagccgcggcgcgcgaggcccgcgtcaaggggaggaatgacggaccggatgtcgacctgctgcttgagcggggccggcgtgtttcgctggttgaactcaaagatcgactgctcgtacatctgttcgttgccgattgaccgaccgggcgcggaggtgtcagcacgaaggcgagggagggaaggggggggaggcaggatgagagctgcgcacggcacgacgccagggagatgcagacgtaccttctcgacgacctcgagtgtgttggccttgacctgctcgtcgagcgggagcagtctggaaaatgaggaggcgagagaggtcagcatgcgttgctcgctcgagaccagggactgaggagggagacgcgagacgggatgcatgcgcatgcaagcctccgcttgcggcgcgctgcggcggcaaggtggcctcgtcctgccctcccctcgccagcctgcctctgctgcccccagcagaaggagatgagaggagaaagtgaggacgtacgacaagcaagcccggacctcctcgttggtgaagagcgtgccagtgacgctcgcgctaaacagactgcaggcatcgcccgacccggttgcgctcggccccggagcggtcgccgtccccgtccgggacgagccggtcgcccgcggcgtgcccgtcgccgtcgctgtgcgcgtgacggcaagggacgactcgagcggttcagtcccgttcagctgccgccggagaaggagagggtcgtcgtcttcggcagaggtcgatgcggcatggcgggcgacgagctgcggtggcgggggcgagaggaggtgcttctcgcgctcgagaatcgccaaggccggcgcggccgcagcagcggcggcggcgagggcgaaggcaaaggccttcatgatggtgggtggtgtgtggatggatgagacgagtgatggttgggtggcgggttcagagggggaagagggcggtagccgacgggcctttgagttgcaagcccaatccacgccggcacatgctgttggactgtttggcggttagaccgtcagcgatccgatcgatccaccccgtcgtccgcaatggagccagcagcaaggcttgtcatggaagaagcggtaggaacctgaaaccagactgcagcaggagtgcgagagagagcgagccgtcgggcatacgtcgctcggagggagcaaggtcgctcggttccgcggctcggtacggcgggctgctgcgcgaagacccgctcgagcgcccttcgcttcctcccttcaaacgctgtcgaccaagcaaggctgactcggccagaggtgcccttcgcctgccgtccgcgccagccggacgttccttctcccggagagggcggaccatggcctcctcgcgagccatgccgacgcctcgctctgtttcgccgctgacgcgcgcgcgcgcccatctcatccgcccctcgggccaactcgacggccgccatccgtcctagccgtctcgctcgttctcagccgggagacggggggctgagagaacgtgctggctctgatcgaccgtgctcaacctcccgggcctgaccgtcgtcctctcaaaagggacctcagtgctctgcctccagccggcggtcactaattcatctccatccagcccgcatcaaccggactcaagccctccaatgtctgcctcgctcacctcttccctcagtcgaacgaccttcggcacttcacgcgcagccacgctcaactcctcctctaccacctccactctctcacgcctcgcaacagcgaccgcccgctcagcaacgatgacgaccctgcgcttcgcaacagccaccagccgagcgacgacgacgaccagccgccgatggacctacacgggctacgcgacggcgacagcgacggtccggcctcggccagcaggtacgggcgggtcgataggaggatttcacgtctctggtaggtccgctccctctctggcgacttagccggcctcgagccttcgcgagctgatggcctaagttggaaccgaaccgccaggcctcatgattatcccgctctttgtcgccgggttcgccggaacgctccttcttggcattgcagtgagccgtcgctcttccgcacgctccccagcaaatggccgactctgactcctccctccttccgtccccggcacagctctgcctcgccttctcacgaacatgtcgcctccgcctccggcagtccatccggcagtccccctttggctcaacctcgtacccctctccaccacccaccacgctgcccgccgccgagcgccggttggggccagacggctttcctctggctggcgcggcgctccgcctctcgcgctcgcttgacgaggctgccctccggcgcgcacggggcggtcaagcgccttcaggcggcgggagcagcgggcgcggcggggtgttgggcggcgtcctcgctgcagctcggcagtctcaggaccggacgacggccgactggctgctggcgcgcatcggcctcggcggcggcgaaggggacggggaggacgacgtgggcaagccgagcttcttcgcggtcgagctgcgggtggcggcggatgagaaggttgggcaggtacgtacattccgctctcccctcggcggaccgacagcacagaacttcaggctgacaagacttctcccgcttccagcccatcagcacctccatcctcggaggccgtacggcgagagcgatgtacctcgtccggctgccctctccctcagacccgcccgacgaggcaatcctacccgagctcgagctcggcgtcgaggtcctctcgctcgaaggcgactactggccgccgggctgaatgtctatgagcccttcttcgaccctggcgtctgaggggaaatgaagtgcagcccgtggtcgatcgtctttcgcaaggttctcgcgcgagccgcccggccgagttgcaacgcgtggtccccgacctctgactcttggcccaacttgcctcatcagtcgaccccttcgattccctacctggtccgcccagacacctctgcgaacctccatccgacctggcagctccctcccttggcctggctcataacgtgccctgcgtccattctgaacgagactccgcggtcgacgccgcccatctcccctccgccccccgctcgtgtgcccaccgtcccatctcaggcccgatctcatcccgaccagccgcgaagatcactcgctccacttcaactcgccgcgagacacttaccgcgaggcgctctactcgtccggcgccgacgacgcgccgccgatcgaggtccagatgggcctcgttggctgggcgctcgacgacacgagcgaggagagcaaggccatggtcatgggcgtcctccgcaaggacgaggtcgagacggaggagagcgacgaggaggaggacgaggacgccgaagagtggctcgaggtccgcctcaggctagccaaggtgcgtcgagcactgcagtccgcgacgcgcgggagatctgtgctcaacgacgccccttgctgaccccttcgctccggcccgcatccagactaaacccatctcgcacgcccagcacctcaaccttctcggccacctccagcggggtgagaccccgccgcccttgccgacgccaccgcccatccaagcgtcgcccgtgacgcgttcgcagtcgcagcagaacgcggccgcgtcgtcgtcgacgctgacgccgtttcccgaatcatcgtcgtcgcgtgcaaccaagacgggcgctgcctcaagccgcgcaaaggcgacgccgtctgattcgctgtcgaaaggccgtccgaccaaggcggcggcggcagcggccaaaccggggccgtcaaagaggcggaagctgcaggagaaggctcaggaggtggctgctgccgcgtctgcggcggcggcggcggcgtcgacagctgctgcctgcccgcctccaagcacggcggcgatgatcgagaagctgctagcggctctcgggcaggcgcagccgcacgacagctcgccgctgctcacgcccgaccttctcaactcgatcaagcagatccaaggcggctcggcagacctggaaaccaataacatcatccagtcgatcctgagcgtgcactcggcctcgaacggaacaaaattgactccagccgcgccggccctgacggcgtcggcggtcgaccagctaccgaccccttcgacctcggccccgtcgaccgcctcgggctctggctcgcgctcaggtgacatgggtccgccgcagcaggacgacgcagccgcccgcctccgccgtctgacggccggcaagggcaaggagaacgcgccgctcagcagcggcggcggggctggcagcgacgcgacgatggtatcggcgacgagcagcgggagcaagaagcgcaaggcgatcgagcaggaggagggctgcgagaactgcggcgcgacaaagagctttgcctggcgccggaaggagggcagcggtaaggtctgcaatggtgcgtcttcttcgaatgtcgcctcgctgtctgaggaacgtcggctaacctcacaacttgtccctttcacccaccagcttgcggcatctactggaatcgctacaagagcaagcggccgcgcgagctctggggcgagcccgagcctcccttcgaccccaaggagctcctggacaagcgcaccctgcgcctgacgcggtcgaccattccgatctcgtcgtcaacgacggtcgaatcggatgcgcccgctaccgcttccgccggcgcctcgagcaagaccacctccgcttcgacccatccgcaccagcagatgctgccctccctgccgccatccccttacaatctccgcacttcgcctgcccgactggacgctgcccgggcgcgctcccaggcattcctgccgatgacgtcgccgctccgctcgggaaaggtctcgctcctgccgctgacgtccccggtgcgggccattaagcggaatgccgctatcaccaacgagtcgccccggacggcgctcaagagggtgctcaacggcggcagccagattgccctctcgcgcctgcacaagccgctctcggacgacggcgtccgcgacatgaccctgacgcccggtagcgacagcaagatgaagtcgtcgagcatcgcgcgcggcttgccggcgaccggctcgtcggccggcctcggcgacgaagacatggacctcggtcagacgaccgacggagacgactggatgcactcagacttttcgagctacttctccttcaacgaggacgacgacgagctgatgaacggctcgaacgctgacacgccgcggacgaaccggacggtcgactcgtccgtcatgggcggctcgtcgccgttccttgcgccgttcgacttttcgaccttgccgccgtcatcgccgccgaccgtctcggccgacctgatgtcgtcgcccgacacccagcgcgacttcaactcgccgctgcggccgctcggcgacaacccctcgccggcgccctctgcggccgcccacgccatggccgcccacgccggccacctcgacctcgacgcgatcaaaacaatgtttcaggccaacagcccggcgtcgacctcgtctgcgacgacgatcccgacctcgaccggcgcgaacgcgcacgacggcccggcggtcgccgacaagaacaatggcggcgtcccggcgtccaagcctgagcagcttgagtttctccgcttctgggagtcgtgccacggcgtcatgggcaagccggccatcatcgacggacacacgccaggcagcgacacgaacaatggcacaggcgacacgccgcctacctgggtgaccgagtagacactccccatcaagcttcaattctcgcctttcctctctcttctctcaccgcagccacctttcctccttttacgactctcctgcctcctgaccctcgctagaatacccgggcctcgcatctctggatcgtcccattcaattccctttgcacctgacatcctacacatcctctgcgctcgccctcgatcccttctgcccgctactcatgacgacccgaaacttgtgccgtgacgatcgtcagccagcgtgtgtacgtaatcacggctgcgcgcgcggggcgcgatggaatccggtcggtgtctcagctgccaacacctgaacacagttcgcgccctcttcatgagcggctcgggctaagcacgaccctgccttggctcccgactgcgaccctcttcaaccctacggaccgcctctcgcccctctcctccctgctggcaggtcatctcgtccgtactccgccaacctggctgcattttcgcttctcagcctctccccctttcggagccgacgctcccttgcctcagccccgcccgctagctcggcctccgacggccatcgctcaaaaggatgccgctcatctctgccttccgcaagaagacgtcgcccgctgccgcaacggctgacggctcgacaaacggcgcccgccagcgcgtggcggccggccggtcggacgcgcacgacgacgacggcatgtcgcccggctcgacgtccagcgccttcccgggcgcggtcgacattgacagtgccctgcccgcttccgactatggccgtaagatctcgtggtcgcccgacgttgggccggtccacaacccgaaggtcaaggtgaccgactacgtgccctcgacgacgggcggccgccggcggtcgtccctccaaatcggcacgaacgcgaccatccgctcgggctgggtcggcactttcacgcgcaggaagcagaagctccagctcgaactccggaagcggggctgggatcttaaccggatcctcctccagaccgtcgccggcgtcgtgctcgccaccctcctcatccgctatatcacgagcgcgaccaacgacatgagtccaaacagcggcccgcgcaagctctcgtacggccggggcgcggccaagaacggcaaatacgtcgacgagaccgagctctgggccggccaggcgcccgagggcggcatccaccagttcggcagtgacggttggctccgctcgcacgtcggcaagaacggcaaaggcggccggcacccgatctgggacctcatggaggacgtgagtctgggtattcctgttgggtgcgagacgggccggcagactgacgcacgctttgcctaccacctgtttccctcaccaggccgaccacaagtacgagaacatgctcaagcatcagcccaagtctgtaagtgacggctgcttcgggcagagatgaaagttcgatggattctgaccctgccgctcttcctcctgcagctccaaggcctcgtcaagcagtacaaggagatctacggccgcccgccccctcgtcgtgcgtttctctgctgcattgtaaggaggtctttcggcgtaattgaccagacctctccctcgtctctcgcaccgcagacttcgacctgctggcgccgcacctcgtctcctcgctgccgtactcgccgcttgcttcgcccaacacgctccacatgtacttcgccatcccgcccgcgctcctgcacaagcgtcaggaggcgaccgagagcaactatgactcgctcgacttccaccacgacggcccgaccgacgccggcaagctcgtcatcgagatccagagcggtcaggcgtcgatcaactggccgtggaacggcaagggatgggatggcgcggccatcgctggagacgattccggcctacaggaccggctcaaccgatggctgcaccgggccgaatgggagggcatcctgtaaaacctgtcgtcgacgagaggtcccccaggccaccagagcactaaccatgtcaaaccacttaccagggctgacgtcaagatcgctgtcaaccaggttcgtcgctctttcgcggatacagtgaaggaacaacttcactgacgactcgtctggctgtctcgcaggaggagctcaacccgcagctgatcccggccgcgtacaagacgaccgcgatgaagcaggccaaaagcggacactgtgagcgccctgcccacgtcgctagatccctcgacatcagcactgatccgtctgacctttgccgtcatcagttgagcttgaccagggcgagcgccgcgaccggaccaatcacaatgactgggcgatcggctgcaactatgactctgcgctcgtcaagggccagaccggctcgttcggcgccgccctcggacgcggcaagggcatctgtgcgtctacactgaagcgtcactcgcgaccgacactctcgactaatgtcccatccctgtcacctctccctagacatcccttcgttcatccactccccgccgaaggccgcatcctactgcctgcacccggccctagctccctactcgcctgccctcgcgatccagccagagcctgtcgaggtccacactcggcccgtcccgcagctcacgtcgcgcacgggactctctggcctcgcaagcgacatcctcgtcctcggcgtcggccacaagcctcgctcagagctgcccttcggtggcgttccttgggaccagaagcacgggcagggcatcttctgggtgagctgcgcatcacagtgacgaggaacagctttggttcggcgcgctgatgatcatcactccttgacagcgcggcccgtcgcccgagtttgacgacccgcttaccccggtcaacgctaagctctcttcggccctccgtctcgccctccttccgagcatgccgatcgacaactactcgttcccgtcgacgctgattgccccgcccaacgtcgtcgacgcgagccgcgtgccaattgcggcgcgcaagcacggcaagaagcagtacaacttcaaggtcgacccgaccgagcgcatcaccagcgagctctggaaccgtggcagcttccttgacgttgccttcaccggcttctcactcgcctgcgacgatctgcccggttgcgatggcctcgtacgtccccttccgacctgctgaagtcgtggtcttgggactgacagctcgagctgttgacagggtaagcgcgtccggtttgacaatgactggcgcaacaaagcccggcagaagtttgtcatggtcctcgacgccgaggacccgcgcgatgcgttcgagtctggcaggtgagggctggtgcctgatgtcgctcgcctgtcaccaggctgacctagacctctcttgcgactccttcagcttggtcctctacacgagcgcgaccggcatgtcggcctggcagacgaaggccatcccctggcgggactacattccggtctcggtgagtcttgaccagtcttcgtttctcgtgacctcgctgcatcagcgactgactgggctatgccaacgctcgcagcccgacttctcggacctgccgtcgatcctcagcttcctccgcgccaacgacgaccaggcggcccggatcgccaacaacggccgcgagtttgcgctcaaggtcctcagcgaggacgcctacgacagcagcatcatcggcgccctcctcgagtggggccgcgtctggagcgactcgcgcccgaagatggacctcgagccgctctcgcactaatcccgcgctcgacgtcggcggtcggcccgctccagagtctctctactgcctctttaggcaatcccatcttctcgcatcatatcctatgtctctgtcccggtcagatcatgccagcgacaggttggccgactgcagcaggccgaccatgcgttcgcccagtcttcttgtcgctgccgacaagacgtcgactccgcgcagcagtatccagtcgccgcgtcccgaaatgggccgccggtgacccgcctctcctgcccctcctcctccaaccctcaccttcctccaagcttctctcttttagcaagcagccatacagactgtcgcacggctcgacttctttcgagcgtccgacttcagcttcgacgtcgacgcaagccttgccgcaagccgacggtgactgcgagcgcaaagcagcagctccttccctccctccgtccagcgacctgtcgccgcccgtctagctcgcccttcttcagcttccagcctacgcccagatggcgacggcgaccctggtgactggtacgtcgccattttgtctgctcctgtcgagcagtgccacttagagtcgctcgcggtcgcctccccggctggcccgcgactgacctctcgccccgcctttctgtgcctctctccctcaggctaccggccgccgaaccaggcgacgcccgtggccacgtcgaccggtgccgatggtatcgcgacgacgattgcagtctcgacgacccggacgagcgccgacacctactggcgggcggcgacggcgacgggtccggcgagcccgacggtgccgccacgagcagacgaccacgactacgtcaacacgtatctcagcattcaccagctgaggtacgtcccaagctcctgtagctctgacccgatggcagctaatagacccggacgctccaccccctctcagcaacccgtcggcccgctacatctacacgctctactttgtgttcgctggcttgctcctcagcctcaccgtcctgcaccaagtgcacttccggggcggccggctcggcgcgctctggcgcaagtttgcgatccggcgcgtcgtcttccggccaaagcgaggggacaaaacctcggtaaacaagaagggcaaggtcaagcgcaagcagccgtggtcgatgccgtccaacggccagctcgtcgccgtcgccctcatctttgcgcttccactcctcttctgcttcctcggcgccgactacatctttcccgacgccaagacgttcgactatcggacttcgttcgtcaagcgggcgtcggcgccgaccgtctacgtcacgccgtcctacacgatcccaaaggcctggtggacggccggctcgcgggccggcctcgtcgccttctcgctcttcccgctcaccgtcctctttgcgctcaagtcgccgccgttcgccatcttctccatctcggccctgacgcacgtcttttacgacacgctcacgctcatgcacaagtgggccggccggctcgtctggttcgtcaccgcgctccacgtcggcttctggacggtccagctcgcccgggacggccgcaacgacaagacaaaccggtcgatgtttgaggtcgtctggatctacgacaaatttatctggggcgcccttggcttcttctttctgagcctgctcacggcgctcagcctccagccggtccgcaagcggttctacgaggtgggcttcgctcctctttctctcgcacgatccggccctgcagctgactcactcggctgctctccctttgtcacttaggccttctacatcatgcacatcctcttggtcccgctcgtcctcatctgctccgccctccacttccccatcaagtattggtggccgaccgccgcgggcgggctctgggtcgccgagcgcgtctggcgctttctccgctatggctgggtcaacggctggtggggcgggctcggcaacggcgagcggcgcgaacggacgccaaagggcgcagcgctcgaagccaaactgatccggcccgagactgccttcgtcgacaaagccggcgagcagcagtgggggatggagcacgtccgggatgtcagcgagcaggatgggctcggcgtcgcacagggcgacatcctctcgcagtacgactacacgtcaccaacgtcgccgaatggcgaccggccctttctcccgccgtcgccgtcgaccgcttccgagtttggcgagcgcacgatggccgagccaggctacaactcgatgcacatcaagcagccggcctactcgcagccgctcggctcgttcagcacctggggagacgggaaagacgtcgaggacagcggctacacgcccgattcactccatccaaacggcgtcttgcctcggggcgccgccccgcaggctcggacggccgccttcctaccgcgcgcgccgtcgtcgttctcgctttactcgcatcgcgcgccccaagtcgcgcggccgatccgagcgtccatcccggccggttacgcgctcgcgcagctcctgccgtcccgcatgatccggctgacgctgcgcgtcccgaagccttttcgctgggcgccaggccagaacgtcctgctccagatccgggagatttccatctggcagagccatccgttctcgatcgtgtcggtctacgacgccgacgtcgagcaggaggtcgtcctcctcgtcaaagcccgtaagggcttcacgaacgagctctggaaggagacccgccgccggatggacgcccagccggatgaggacgctggccttcgatcgtcgacggcctacaatgcgccgatcgccatgtcgcagactggcagcactcgcggctcgttctactttgcgtcgtcgtcgaccaagctgtcgacgcgcaagcccgtgtttttccgcgcgctcgtcgacggcccgtacggctcggccgcccgcgtccgctggggcacccacgcatcggtactcatcatcgcaggcggctcgggcgtcagctttgccgtcgccatcctcacttacgtctgcgagtgcatggcgagccgcgacaagctcggccttggctcctcgggcaagggcggacgcaacttcgttaccgagcgcgtgcgcttcgtatggattgtccgcgactttggtcggtcgtctcctcttaatcctctgactcatcgcccctgcctgacagccacttcctaccctgaacggcagccgagatcctctgggtctcgaatcttctgcgccggtgcatggacctcgtcccggcgactcagcttacgatcgacatctttgtcaccaacttttcggcctcggagaagtcagtctacctcctcggcggcaccaccagcggcaagaatccaagcgtcgacggcgagcttgcgccccctcggccgctctttgccaaggggagtgctggtcgggaccggtccaactcctctgactcgctcgcctcggcggccagcgtcgacagcaacgtcgacctcgcctacctcgccgacacgagcgtcgcccgcggcgagctcgacacggatgaccgcaattcggtcctcgagctcaccaactgggacgaagacatggacgacgaggaggacgagcggacaccggccgagcggtcgctttcgctccgggtcaagaaggagggtcgcatccggcgagccaagtcgcgcaagcgtgccgcagccaagctgcatcctgctgggacccagagccagcctcctctgccatcggccgactcgcgggcaagcatctcggatgacggcacgagctcgccgcaacgcatcccgtacggacagcgatcgctaagcgggagttccttcccctcatcggcctcggcgggcgatgactttgcctcgccagcccggcacaccgtacggtcgccgagcgggctgcggacctacaacccacgcaactcgatcggcagcatgacgacggccgagagcgccggcttcgatggctcctacagcgcgcaaaacggcagcgcgaccgactttggccccgggcctgggtcgcacaccgaccactcgtttgtctctggcgccgagagcacacggcggctcgtcggcggcgcttgggacgagcatcggcagagctttgtccgcgtcgacgtcgagggcgaggacaaggaccagttcatggacgagggcgatgaggaggatctcaacgtcgtcgccgagatggctcggcccggtcggccgctgctcgacaagatcatggccgaggaggtggacatcgcccagggcatgatcgcaatcgcctgtcagtcttggatcgctcgtgtcgcgcaggctgattgctgacgcctcctcgttcttctcgtgctggtcgcagcctgcggcccgtcgtctctcaacagcaccattcgcaacgtgtgtcgccatccactccgtcgaaggctgtcgcgccactgctgatcgcctgcttcgctccttcagatcgcgtcgaaactcattaagccctcgcaagtcggacgcaaaggacgcgccggctacatcggcgagatctacagtgcgttccacctgctctcggtcgaccaggagaagcaactgaccctcgagcgttttggaccccttcagccgaggagtatggctactagccgactgctgcgccgactcttttttcctgcctgcccgtccccttagagcacagacactgcctgaactccactgtaccgccctatcctattgctcgtgcgtgccgcgcttgtgcttcgagcgaggaggaattgacgactggcgcacgcaggcgtcggcgagtcggacgagggtttgcgctcccccgacatgatgcaacgcgcgtgggcaccatcgcgaatgatccccgacagtcctcgagcaaggttcgaagcacaggccagtcaacgttcgtagcaaggtgtcatgggcatcgtgagacggagataatgggggggtacaaggcaagcgtgagggatggcactgcttagagcttctgcatggcagcaatgtcggacgactggacgtagtcctcgaactcggcgatctcctcctggacctcgtcgagcgagacgtcgtcggtgatgacgagggtgatctgaagtttgcggacaccgtagccgatggcgacaagggtcgaggcaccccagacgaggccctcgcgcgtgacggagcggaccgacttctcgagctcggccatgtcggtctcgtcgtcccagggcttgacgtccatcgtgacgaccgacttgccgatggcggccgggcccttggcagccttcttctcgttgtaggcggcgacacgctcggccttgacgcgctcacgctcagcgtcctcctcctcgtcgtccgagccgaagaggtcgatgtcgtcctcgtcttcctcggcgtcggccgaggccgaggcgccgccaaagagcgacttggaggcagcggcgtctccggggagcgacgagaactcggactcgaacgacttgatgtgcgagtaccagcgggcagagtgggggtactcagaggccgagggagccgactcgagagcggagaagacgccggcgtcagcctgcgagggcgcgtagctacgaggccaaagggtgaggaagtcagcgtcggctcaagcagagaaagcagggaagaaaggaatgagaggggaggagttcaggtcgctaggattgtgttgtcggcaacgcgtatggcgggggtcttacttcccttgctaagtatcacggaccaagcgtaaagatcatcatggtatgatggggaggggagtggtgggaggagaggaacgtgggcagagaaagagacgagacgaacccctcgatgtaggagcgggtagcgaggtgctcctcgagctgcttgatgtctgtcgaaaggcagaagccagaagtcagcaccagcccgacatcagggaagagacaagagctgcttagacgtaccagagaaagccatgatgaaaagagatgatgggtggttgggagagaaggttgggacaggcgcggtcggctgaaaaagcggcggcgggccctccgaaggcggcctttccggctcgcatctgcgagtgcagcgtgaccgggccctggcaacgggccatccgccgccgccgacatcagacgacgccggcgagagtcacgctctcatccctcacgtcccggctcagctttcccttgtgcgtatgaggcgggtgcctggggaccgatccgctgcattaaggtcgacgctgaccggcgttctgctccgtgccgcatctttctcttcgccgctgccgccgtcgccgccgcctccagctgccttcctccctctcggtccgcgacactccgccgacatcctctcagcacctagacggctagagctgtacgccctcagaccatttcgcactggccttcctcccctagatcgctgacctgagctttcttccgtctggttggccgtcgcagcttcccacaacccctttcggcccgcacctctcgatcttcccgccatgaaggctcgcgcgacgacgagccttaaggtcttcagccggcccaagctgccggtcggccactcgcgctacgcagccaagctgcccgacatccacgactttccgatcgtcaagccggcaaaggcccacatgatcaacacaaagaagtactacccgtccggcccgcagcttcaccagacgcggctcaagtacccttacttgagctccgagacgctcgccgaggagatctcgaagcaggctctgacgcagaagacgtcaaacatcctcaaggagctctcgcaggcacttggcaacgtcagcacgggcaagctcgcccggccagtgacgggcatggtcgtcaagatctcgggcgtcaccaacgtcgagaaggtgcgagctctcgcttcgactgactgccatgcgctggcgactaacgccgctcttacttttccgcggctctgcagagcttcaagaccgtcatcacgtaccaccgtggctcgctccagaacggcgtgcgcgagcagactgtccggacgcgcaacggcgccatgggctcgcggacgaccaatgtcacgctcgtctcggccgcttacccattctagatggcattccagaggagaaacgttcgccgacaggcttgtagtagaacaggcgcttgagggactgcggggctgcccaagtgccctgaatcgatgaccaccgatctcacgcgtcgttcgcctaggtcccccgatatcgccgctgacgattcgatctagatcggctcacccatctgtgtcgccctagctgcgtgtgaaccttgagcggctcgtggagagacgggcagccaaatagcttcatcttgtcgcccacttactgccagtcatccgcaccagcccaacgaccattgccttgccacacggcctcaacttacgttccttgcatacgcgagtgtccctttctgaaactccaacgtctaccggtaagccgcgtccctgaatcatccttgcggtgccagccgagggcccgatttcccttcgaccaggtgaagccggatccagtctgggccttcgtttccgcgcccagtcgccccttcgagcccagtctgctgatgtgtcccctcctcgccctttccacagtcgtcccacattgctaccatgcataagctcccagcagcgccatcccttgtatcttccttttacctccgactatctttcctgtctcacgtgggcacatgactgcttgctaggacgagtggctcgcaaccgcgaagcatgcttcaaaggtttctgtcaagagaccttctaggttaccaggccatccggtcgtcgctcagtgctctgcaaggaacatccagtcgctgatgcctcttcagcgccgagccgggggtcaacaggctgctgaacgggctgccgtacggggagactctgcttccgtcctcagagagccagcagtgactgagagcattaccgcctcccgtcactcctcctgcacccagtcttcgtccagtccggattctgcgaaagggacgcatgtcatctcagtagagggacgtccgcgtcggcatccagtcagcgcccttgacgtcaaggatccgccgggcctcggcctccatctggcggttccaagcgtcgacgtgcctcgcccggacggggccgacggtgccaacaaagccgtcaatgatggcctgatccgggatcgtctcgagccgggccgtctcgcgccggatgaagccgacaatctcagagatctcgtcgaccatccggagcgggttccagtcctgcgggatctcgctcggcatcggcggcgagtcgaccgtcgtcgggatcggtccgacccgaccctcgccaccgatccggggcgtcaggtcggcctcggtgatgacgccgccggcgccgtcgggccggccgacggcaaagctcttgacggcccgcttcgagatgtcggcttctggcactttgatgccgtacgtgcccttctcgatgccgcggccgccaaagatgttgcgccagatgtaggaagcgaggtcgacgtcggtcccgccgaggccgaggtcaaacgagaagcggatgccctggtactgctcgccaaagtcgcgcatgtactgcttgaccatgcgctcgggcgtcgcgttgccgagcgtccgccgcatgcgcgtctcgagcagcgaaaacaggtgcgccagcagctccttctggtagagcatcgagatctcctccgggagggcacgcagtcggaccatgtggatcctgagtgacggtcgcgagacaaaggtcagtcgtgcgggcctccggtagaagctaaggcgatgccgacgcacatgacgatcaggcactgaacctggaagtaggcctggaaggtcgccggcagccggcactctgcggggcgaggacgatcaaacgcgtcagctgcgagcagctgacagcacagcgtgcgacagacgagcgacgcaccgtcccagaagaactcctcgttgcgctcgacgccttcggtgcagaagccgaggatgtagcgcgtgttgccgatagctcgcgacgtcttgttgcgaaagacgaccgagccgaccgacttgacgaccttctgaacaaggggcgaatacgtcttgcccgacggcttaggcgttcctggcaggagtgacggcttggtcgcgacgtagagcgaaggatcgatcttccgcgctggtgcagggctcgaggtgacggttcgtatcgtcaacggctggaggagctgctgctgctgcacgaggacaccgaccgaacggagcgggatcgagcgcggggctcgcagcgtgcgcgaggctatcgacgaccgcatgggtgtgattgccaagagcttagagactagcggtcgctgggcagaggcagcgcgagctgagtgtcggggagagtcccggtgcgggttgaggcgaggtagctggtgcgtggaggatggggcgaccttcggagcggatcggcagaggatctggagctgagggcccgacgaccagtcgccatatccagcgcaagaaggtaagccgccagctcgtacgcaactacagccagctcggacgtacgggtggcgattggacggcggcttgggtgatggtgtcgacccgaccttcgacgatttgcccgccgagctctctctccgccggcgcgagggccgacgacagcgacgcgggcgggcggtgccgacctctcagctgacgacgacgaccagcctcctgccaactcttcaggatctcgagacagtacgtcctgcccgtgctacgagctcatgctgatgcgtctatgctgaccttgtcggtgaatgggaaaactcacacgcagctcgcacgaccgacccttctcccagatcacccgccttctccctcctagcacccctcctcgtcgcctgtgatgcctccccgcggtcccaagggccagctcgttggccaggtgcctccaaaggccggcaagccgcggcagccagcgcgttccaagcaggccggtgcgaaaagggtgcgtctcgggcgtgtcaattgtgtcagagggcgagatgctcgacggtcactgacgcgcttgtcatccctggtctctctgccgtcgttcggcgccggtcctgccctctctctcgcagtcgactctcatggtccgtaacctgccgctggatgtcaagccggaagacgtgacgggtgcgtctcaccctgccgctcgcctggccattaaacgcgtcgcgtcaagcgcacagccggctgtactgactgtagcgcgctcgcatcgattcgacagaactcttcacggagacgaccggtccgctgtcaagcgcccccgagatgttctgcgacgcaaagggcgagttcaacgggacggccctcgttcacttccgggacggcgacgtgcgtctcccagtctcggtttctctggccatacctcggttgcatctgagtactgaccccgctgcgcctcgcgcactccgccgcagtcggctgccaaggcatgggagcagctgaacgagaagcttgtcgacaacagtgcgtccgacctagccttctcctctcgtgattgcgctcgagtgctgacacctccttccgaacctccttcctggacgtttgcccatagagactaggctttacctctacctcgtctatccaaacccgccagcgcatcttctctcgaacccgccagcatcagcaacaggagcggctgtctcgtcactcggcaacctcgcgcccttccccggccaaacgcgcaaggcgccggcagcgaagaagccgacgccgcttgcccagcggcttggacccgtcccgatcccactggcgtcacggctcgggaaggtcgtcagtgagggcgctgtcgctcctgccggcggcgccggcggggcgaagaagacggctcgcgccaacctgaagaaggcggctcccggtgctggccgtaagaagcggggcggggcggcgaaggcggccgggaggatggacgtcgactgagctggtgactcttcatgcgctccttatgacgaccggagggaggcgggtgagtgtgacagacggacggaccgtgtgtgacgtcgggcgtgcgactcggcgacatcgggcatcaaatgaaggtccaggcagagtgactggcgcccacctttgggtgcgacgggtcggataggacgtcgggagcagggtgacaaagatcatgagcaagtccattcggtctgcatctgctgccagtcagcggagagaagttgaggaggttgctgcgctcgacgcccgcctcagggctgtcgaagcgcgccatgccgaatgattgaccgtcttggaagagcgtcctgccctgctgtggctcttcctaggctcgcccgttcaagcggctctgtcgtggccatggtggagccggcgaccggccggacggccagagggtggcttggtgcggcttgggctgtcacgcccggcggcggaacggcaaggggaagcgatcgaggcgcgcgacttctccctgcccattcatttccatcgcctctctctccgacgaccgcccgcacacctcgccctcctcctctaatcaacccctcctcttacgccctctatcgacagcagagagccgcatccgctctcgcatcccgttccatcggaaaagccatggcctgcgtacgtcgttcatccagctgcctcgagctcggctgcccgacagggccacctgttgttgctctggtggcgcgagaggcggcggccgacgcggcgtccccgctcggctgggggctgggcaggcaggatgagagctcgtctgacccaacctttcctcgccattcttatttcgagcagaacactgcggccgtcagcacgctcttcagcgatgtgcccttcacgacgctcatcacgacgacaagccagctcgtgaccgagattgtcacgtcgtccgcttcggccgtcgtcgacacggcggcgaccgtcgtcaacggctcgtcggtcgtgctcacccggacgaacgacgtctttgtgcccgtcaccctgacgcggaccatcccgacccagctcgtgctgacgagcatcggcatgcggtacgttcgcctacttcctgatggccgagtatccggagggctcccagcgcgcgcccgaccttctgctcggcctagcgatcggcggaggccgccctggcgccctgatatcacgagcggaagcagagcggtttgcgagcgaccggtcgccgtcgtcagcttggccgatgggcgagggcatcgggtcgagagggccatcctggctgcagcttgtctgcgagctcagcctgcggaagggccgcaagagggtggagcgagggcgcctgcgtgtatgcgctggtcaggcgcaagaggccagacgctgacctctgatatctgctctgcgcaggaccgagccctactcgaccattttctccacctcgtgcgcgccgacgtcagcgccggcgagctcgagctcaatgatcgacgccgccgcccttgcggcctcgagtcttcagtcggttggctcgatttcggctcagtcggtgcagtcggtctcgtcgacccaggcaaaagccctcaactcgcagtcgcggtcggtcctcgcggcgcagtcggccctgtcgaccgcttcaacagcgtccacggcgtcgaccgcctcggtcgctgccgccctgtctgcttcggcaaatcggagcagcagtgaggccatactcagcagtgagagcgtccgcagcaccagcttcaagaccgtcttcttcacgagcaccatcaccagtggcggccgggcgtctgccgtgagttgtcttgccgataatcttttgagttggcgggcctttgctgacaaccccttccgccgtcgctcgctcagcaaacctttacttccacccaacctgccagcggcagcagcaccaacacgggcgcgatcgccggcggcgttgtcggaggcatcatcgtacgtccttctcgtggcctccccgttgactccctgagcccaagctgatcttctgtatacgctcgcaccgtttcagggtgttgccctcattgcgacggcggcgttcctgctactccggaagaagaataagaagcgccgcgagtcgcaggcgttcgctgggctcgatatcttttccccctcgaaccacaacgagaagttcccgccgacgaacgacagcggcacgctcgcaggcggcgacccggccatcatgggcgctgctgcggctggtggcgccggtactggcgctggcgctggtgctgctcagcatgctcgtcgggccagcggtgcggacggcaaaggtgggctgtgggctggcgcaggcgccggcgctgcagatcgccgcaggagcagccaaaacggcggccagccagcgctcaacgaggaggatgagagcggcgcgttcggcggcggcagaatcgacccttgtgcgtgacgtcctcacacaaggccggcggtcatcctcttgcagctgctgatagccgcctcgcctttcttctgcggcgcagacatgtacgccaacaacccgacatctccgcccatgtcgcagggaccgaacggcggcgctgctgcgtacccgcatgacggctacggccaggaggcctactcggacggctactcgcagaacgcctaccaggatggctacggccaggacggttactcgaacggccaggacggctactcgaacgactactcgtacggcagccagcagcagcaccagccctactcggacgccccggctcccgtgtgggggtcgggctacacctgtgccgccgctgatgctgccgccgctgctccgtccatgcactcgcactcgggcagcgccagcggtgcttcgcagtgggacggcaacaaccgggtttcgctcggtggcgtctcctcgtcgcatcagcagggcggaccgatgacgccgcttcagtcggcggccgcgagcaaggcagccgaggccggcatgtactcgcctaacggcgcgccccggcattcgcgccagcttagcaaccacagcggcgtcatcgtccaccaggacggcggccgaccgttgccggcgacggcgtcgacgagcgcagagggtgaatcgtcggaagaccttcctccgccgagctaccagtagaccgccgttcgcacccgtccccttcgtagcctccttgccaccctgctcctgctttgcctttcgatcttgacgacgacccatgtcccttccatgtcccgctcctctctccctctcataacttatctttccagcgccgctctgggcgcccgtatcacccttgtagcccaaccctgattcccccgaactgtgcaccaatcgctcgtttcttctctccgccgctcgttaccgctctgccttccattcgacatacgacccctccacgctcattggaagcgtggcctgcccctctccctacatacatagcgactcgactctgctttcccgctcgccctgccgcactcgcgcctgtcgttcgcacttctccctcgatgatgcttcctgtccactccactctctctctctctctcggctggtgattgaatggacagagacatgaatcgaagagaaagagggggatctgctagtcggtctggaccccctcggtgacgccctcggcttgggcacacagcgtcaagcgccgtcagcatcaattccgagccatcgcagcaaaggggctcggacctactctgctcctgctcgtcggccgaggcatgcatgtgggtccgaagtctgtcgccctcgtggatgcggtgacgggcgtactgaacaaattgagtctgaatgtccttcttcaggtcctgcaggcgagcattgggtcggagaaggagtgcgtgcatgtcagcgcgagtaagcaatgaattccggtcgaggttatcaacagtacgcacgctcatctggtcttcgatagtctggagctgactgaggaggtcgtcgtgggttgcctcgccgaccgcaaggatctgcgtccactcgtcgcccgcctgcgcaactctggacggcccatgagatcagatgggctggccagaagcgatcgtgtgctgatagaattgacggaagtcaggtcacgtacagctcgtagttcctctggcactctgcatgaaacttcctctcctggcgtgttcaaagaaaggagtggtcagcgcgagccgagcgacaagacgagttgtcaaaatcaagagcaaagacgagcacacacctctgctgcgacccgggcctcgatcgtcctcaggatgtccttcttgcggcccttgaccttctttgcggcggccgctgagtaaagacagaagtcgccctgacgtcagccctgctgcgcgcgacctcgagcgacgagccaacagtcgttgatgagggacccgacccttgatctgcgcgacgagcttggtgaggtctctgtcgcgacggatcagacgagaggtcagcaaggggttggtggttagctgcgacaagcggtcgagagggggtgcaggcagagcagctcggcacgaacccttcgtcgctctgctctgaactcgtctgcgggccatcattcaaagaggagtgcaaggtcgcgtgtcagcaaggcatcgacgagactgcagcccatcaggtctatagcacagaagcttcccgtcgacgaaggagcagctggaagctggccgaagggagagttgccgacgcgtgtggcgatacgaaggggtttcccgtcgacaggggctgtcgaggtagggacgcacctggctcagcggcgaccgcgccttgctctgggcggcctggccgtcctggtcggtctgcgttctggccatgctggtcggggagaggcttaaaaggaagggcaagggaagcttgcgatggtggtcgtcggccgggtcccggggaggcgccgagagctgacacgcggaaaccctttgacgcccggcacgcctgctgagaaggtcgacctgccggccgggccgagtgttcgccgacggcctctaccgcctgtgctgccctcctaagtagcccaactgcgtgcgaagaatggagaaagaaaacgtcgatacaaagcccgcccccatcgtcgagggcctacggcgggcacgccatcatgcgcccgccccctcctgcccatcaagaggcaagagggcatctagtcgagccccccctctgggcgtctaatagcccgccgcgcccggggccgactcgccctgccggcggagcttgagcaggacctccttcatccggccgagatcggacccgccgccggccgtccgggcgagcgtctttgactgcgagttttcgagcccgaccatgtcgcagatgcgcgcccaggtcgtaccttcgccgagcttagcctcaagcgtcgtcaagaaagacgcttcgttctccctaggggcgcagacggtcgaggaggtcagccctcgtgcatgcctccgtcaaggcgggcgggcgggacgcacttgttctccttgatggcctgctccttgcccttgttgtagtcttcgtaaaagctgtcaatgtccttctcggccttggcgacgcgctcctcgcgttcgcgcttgctcttctcgtcccgcttggcaatctcttcctgctgacgtgcccgccacgacgtgatggcctcggactcgggcgatgcaggccgggcgccggcggctgacgacgaggaggcctgcggctggggcgaggacgacgggccgggcgagtagggcgaggagccgtactgatagttcgagaccacaggtatcgtctgctctcggccgagaagagtccggggcccggggcggattgcaagcgtgatacagaggaggcacgcgcgagggagacgacaacgatagcaaggaagggaggcgatcagctgcctgcgtcgtcccagcggcggaccggatgagagtcgtctcagcgcaccttcagctccgacggcatgagctcgtcgacgtccgggtactcggcctggaacttgttgagctcagcatcggcctcgtcgtcggcctcgacgccggtgatgttgacctgcggcgccggcctgtcgagcgactcgatcgacggaaagccggcgtcgggcccggcacccgtagatgacgggacaggggcgtcggggactgtctcgccgtctgtcgcggttgcgcgggtcgaggggtgtgagtttgggccgaaacaagggatggaggggggcaagggaaagagtcagtgaggatgtcctttcgccggctccgtcgcgcgctcggcctgtgactcatgcggtcgccttgtgaccgaagctggcaagcctaagccagcatcggatggcgtagatggccggcacgcgctccgagccaagaggaacaagaagaagggtgacagacctccgaggtccgggaagtcggtcgtcggcaggtcaaacgcgcctgcgcctgcaggagcagcgttcgaggacccaaagagctcggcgtcgtcgcctgaatgagcgcaaggaagagggttgtcgaggcggacgagacggaaggaaggagacggtcgggaggtcgactcgagcgtgtcagctcggcgggcggcggtctagagacgacgagctcccgacacgagcaggcgaggtggaagaacggaccgaggatttcgcgctcgcgctggagaaagtcgtctgtgctcatcgctggcttgtcaaagagaggatggtcgtcgggctgctggcagtctgttgcgatggctcggtcggcctcgccgcccctctgcgcgcgcgggcgccctctcgccgtaagcatccttacgcccgccagttacgcttgccgtgtgacaggtttttcgccgctggcctcgaaagagcgtcgccgaccagacgtcgctgccaacgaaccacgccccccccccccactttctgtcggtccgcctcatctactcgctcaacgataacttgtgccgcatgctgacgctgctccgctccttcccatagtcttttcccttctaaacaccgcggaagaagaccaaaatgtgttcgtcccgcctgcttttttcggccccctcctggccctccgctcgctccgaggcaccccgagctgacttcctccctttccctttccttcagctgacgctggatccgagcccgttgacaccgttgaggaggttgaggtcgctgaggctgcccccgccaccggcggtgcccccactgtcgaggaggccctccaggaggttctcaaggtccgtcgcccttctctcttgcttgtcgacctctgccgttcaaccgactaacgtcgacccctcccttaacgtcgtttagaacgctctcgtccacgacggactcgctcgcggtctccgcgagtgcgccaagtcgctcgacaagggtgtcgctcacctctgcgttctcgtcgagacctgcactgagggtccgtcccttgtcaccagtctcgactctgtgccggcgtttcgtaagactgacactctctcgtctcctcctctctcgcagccgagtacatcaagctcatcgaggctctctgcgccgagcacaaggtcaacctgatcaaggtctcggacgccaaggtcctcggcacctgggccggcctcgctaagatcgaccgcgagggcaacccccgcaaggtcgtcggctgctcgtgcgtcgtcgtcaaggactacggacaggagtcgcagggcctccaggtcctcctcgactactttaagtcgcgctaagactcgcatccgctactacgccggacgaccgagagtttcgtctcgggcgctggcgcttcactgcgtcgcgcccgtcgcttgcctctgatctgatggttgggtgttttaaatctgtctgcgaatcgagtgcgaacaaaggcctgtgagaacagccgcgggaaggtctactgccaggggaagactcaatggaagggatcctcgtcaagcgtgcgctggggctgctacatgggagagatagcctgctctttgcacctgcccgccccgtcccagcccgctgcccacgaaccaaagtactacaggctccgggccaggtgaaaagaaaacgagagaggatcgacaggcgacggcgaggagccggatctgcgggtcggctccaggggcgagcctgcatcgctgcatcgctgacgcgctaggcgcgggcggccgccggcagcgagaccgaccgacggctgctcctcctcccccgcatcttgcaagctccatcgaccccgagccacaactccttcacacgacccaagcaagcagcagacatcctgctcattccacaccgactaccagcttgcacacccttcccagccgtctcttcgtccgccaactcgctcgactacttctcaaccccttcccctcggctccaactctcctctctccccctcgtctccaacggaatgagccagagcagcagcaccagcagccagcagtcgcagccgtcgaccgcccggcccgcccacccaaagctctcacactcgctctttgcccaggccgcctcccgtctgtccctcgttgcccttgcgctcttgcctgacgcgcgcgctcgttaggctgatctgtgctcctcatcccatctgcagagccgccgaccgacaggttcgtcgacctccccttcgagcggtccgctcccatcgcgacctctctccgcctacgcctgtcttcatgtgctgacggtcagatcaccgtcctccactctcagcgaggaccccgaacgcttcacctccacgccctcgccaatccacagccaggtcgacgcctcgtccccgcccgcctcgcactcgcccggcatgtcgagctcagcctcctctgcccaggtctcgcgcccgggcccgccctctagccccaacgctcgcagccgggacatcaccgtggcttcgggcctgcaaaccgacggtgtgcgtctcactgctgctatctccaccgtcttcggcggctccgatgctgacttccgtccgactcgctgccttgtcctcctgcagacgctcaaccagcacccggcgtcgacggccgaccgcctgccgacgttccgcgtcggcgtctccgaggaccgcaacaagaagtgccggcggacgatggaggatgctcactcctttgtctacgactactgcggcgtgcccggccagggctactttgccgtctttgagtaagtcctttcttcagcagcaccgaggcttctcatgcttgaggcctcccttgacgcgggtgggaggcgcgcatgtgccgaggcatcccttcggggtcactttggctgactacgcggacgctttgctccacgcacccccttcagcggtcacgccggcaagaactctgccgagtggtgtggcgcccacttccacgaggtaggttgcccttcctcatcgccgatcgctgtcttgcagcatctgccggatcttttgagccctgacggcgacatctcctcgccttgctgcagcacctgcgcaagcacctcgaggcggcaccgaaagaccagccggtgcccgacacgctcaacgagacgtttctctcggtcgaccgcgagctctcgtcgcttgccgagatcgagaagacccactcgggctgcacggccgtcgtcgcctttctccgtgtcgaggagggcagcgacgcccacccgccagcacctgctggggccgacgggccgaacgtcgccgttgagagtgggtcgcctgatgcggatgctgacggcgctgccgacgacgaccataagaaggagggcaagctcgcaaaggtcaagggcgtctttggcaagatcacgggctcgtcgtcctcgtcctcggtctcgggcgatccttcgggcttgcagaagacgagcagcggcctgatgggcgccattcggtcttcgtcggcctcgaacggggccagcacgacgaagcctgtcacgcggccgagccaggcgaagcgcgtcctctacacggccaacgccggcgacgcgcgcgctgtcatctggtgcgtgattggcccttggcgccggcctgtctatgcgaagtgtcgctgacccgacgcccaccaccttgtcgcagccggcgcggcaaagctgttcgcctaacgtacgaccacaagggctcggatcagcaggaggccaagcgcatcaccgacgctggcggctttgtcatgaacaaccgcgtcaacggtgcgtcagcccgatcaacagaaacgacttgctgtgttgcgttgctgaccgtgtcgcttgcccccgactgcaggcgtcctcgccgttacgcgcgccctcggcgacgcgagcgtcaaggagtttgtcgtcggcagcccttacacgaccgagacgcggctcgacgaaggcgacgagtttctcatcgtcgcctgcgacggcctctgggacgtcgccgaggaccaggacgcggtcgacctcgtgcgcgacatcgaggacccgcaggaggcgagcgcggcgctcctcaagcatgcgcttgagagcttttcaaccgacaacctgagcggtgcgttctctgcgcatctgatgcactgcgacgcgacctaaatctgaccttcgcctatgccaccctacgcctccagtcctcgtcgttcggctctcgcccaggacgtcggtctgatgtcgcgcacactcactttacaaagcgcgcttgatccatagcctcacctctgcctaaagaccggcactctcctctcgcccaacgccatacgcttctgttgctgcttgctcgcacacacgcctctcttgtaacaaccggcactcgcccgtattgcctctgcttttcctcgcctttaccctcttgcagcctcggatggatcttgacttgaaagatcgcctggcgccgcaaagtcgcgcgaccgcgattctgtcgagctgggcaacgaccaggagcaagggcccgatgtcgacgccagagagcgagagaggaacgcccgcgtctgcccatcccacccggaccagctgcttcgaaagtggtcatgggtcctaggcctcctgctcgtcggtctcctctgcctcccgacggacgcgtgcgagccgctccctccggcgctgctcgacgccgtcgagccgctcgcgctcgacagccatgatgcgctccatccggtcgccgtcttgcggcgagccctggcgcctgacgagcttgtagaaggcatgccgcttgagcttggagatgaggccgagcgaccgggcgaggatgaggtcggacgccttgcactctgcgggccggaagggacggggggagccagtccggtcagcatgctggctaggaagcaaggcaagcaggaaggtttctgaccctccaatgggtcgtctatcataacgtctttccgcgtgatgaaggcctgcgaaggggaaggagagtcaggagcggaaggtcagtcgagctgctcgggacggctacggctccctcgcgtcttcctcgccgccgctcccagcccttaatgatggtccagccgtctgtaaagggcactcagcggcggcgacaccagccaggacgagcaagggccgagccaggtctgcagccactgccagcggcgaccgtcgactcgatgcccctctggcgagccgagccaaactgagctcctttccaggaacgaaggcgtcgacgcaccttctgggtctttttgtgaaagtccatgccgatccgggtgagcgtggccgtcttcggcatcgcgcccgtcttggagacgacgccgaggatgcagcccgggttggcctcgaggatggccttgtacgtgcgcggggtcggatagattcgccggacggccgaaaacggcacgacgagagggaagttgggcggcatcggtgagcttgagaaatgggtcgagagctgagacagacggctagaaatcggaaagggcgcaggttcttgacggaagagcaggagggggggagcagggcgagaaggtggtcgttggcgtcgacgtgcgagagggcaagccgggcggaacgagctccgcgcagacggtcggccgttcgtctatagtacctctcgaacgcaggccacctgctcttcactcaagcgggccatcgaacggtcgtcgtcgtctctaaggtcatatctatggtgtaccgccctcgtctgatgctggcggcgtcagcagacctgcctgcgccgccttgagtgcagctcgcttctccctctcgcgcttaaccgccgctcgtcgctccttcgccgcccgcatggccgcttcggtctgctcctttgtctggcgctgacctccggcagcctttggtggcgggtaggctgcggcgaggacctggttccagatcgtctcgatcccttctccgttctgcgcgtagcggttgatgaagtcgagcggcgccctcgagaggacatagtctgcgacgtccatgccctgcaagagtggacacagtgttgcctgctgtcagctaccgagctcgtcatcgacgttcaaccgtgacggccagaccgacgactggcagctgaggactcacgctcgagggcctgtcgatcccgatccggacctggaagacctcgccggcgttcttccggccgaggacgtcgagacacgagcgcatgccgttctgaccgctcgctgacccgcccttgcggatctggaccttgtcggctgggaagtcgaggtggtcgtagaggatgaagtgggccgtcgacgggccgagcgggtacctcaggaggagcggcttgagcgtccgacccgagatgttcatgaggaagtctgggcgcaggttgcaagatcaatcttcgatgcagcataaaacgtcgttgcgggacaacgacgtactcgacttgacaagcgtgacggtgaccgcttcgggcccgtcggtggcggcacgaacgtggtcgggcgtcggtacgcgaccctcagcaagctcgccagacagcttctgatctttggcaaaggggccgaggttcagccgcttggcaaggttcgtgacggccgtctgaccgacgctgctcgggcggcaagggagcagcaggtccggcgcagcggcagagcagaggagtctcgagtcagcccaggcgcagctctgagccacccagcgccccggcttaagcccgcacctgtggcgcgtcagcggatgtgtcgcattgccgagaccgtagagaacgatatgcttgatgaagggcgcagcctgcctgactgcaggaggcggagtggcagccatggctgaggaggggaagttgacgaggttgcggcgacggccggtgtgctgctcgtgcgcaggcgacgcgtcggagggagcgagaggccaaagcagcagctgacaaccgactcctttacagactcgtggctgattatctcaaggggacgggctacctggcctgcagtgctcgaatgtgccgtcgagtgcgtcgtgggtcgtcgtcgaggccagagcctgttggccaactgggctgctcgtcgccttacgagcttgatgacgattgcccagccgccgccaactgcccgctgcactttgcagcgctgcttgctgagcttgcttgggcttgaccaaccctccgcgccaccaaccacatcctcactcgttactctcttagtagatccttatccagccatgcccaaccacgctcactttgccgcctcgccccacctgacgcctaaggacctcagctcggccggcacgccgacgaccgacgccccgaaccccttctcgcggccgtcatcgcccgtcggccaggtcgccccggacaagaagctgcacgtcggcttcatcggtctgggcaacatgggccggccgatggctctgtgcgtacgagacttgcagcttggttcgcgatgggctggaggtgtcgtggcatcgcctgccgatctcacggcgtccagagattgatcttcagcggctgaccgggcctacctgcctcgaccattacagcaacctcgcgaagcaccttcacgagacgcagcagccaccgctcaaggtctggaaccgctcgcaggaccggaccgatatgttctcgcgccgggccgagaacattccgacccaggtcgcccagtcggtcaaggagattggagagagtgcgtcgaacgacgacgcttggcctcgagatctcggcgcaagaggctgacgtccgctcgcggtttctcctctcctccccctcgccgtctgccagcttgcgaggttgtcttcacctcgctcggctcggatgaggctgtcgaggccatctacaccgagctcttcgccgcgcaggaggttcgccttttccctcacatcttgctgcctgcgcaagaaccttgagctgacgcctgactgtgtgaccttcgcgtgtgatggcagggccgcaaccctgagccgctcaagaagacgacctacatcgacacgtcgaccatttacccgtgcaccctttacttttcctcgctctcgtcgctcctctgctctgtgactgatcggtgccccccccccccgaccaggacgactgcgggccggatcgagcggcttgcttcgaagctgcccggccgccacttcctctcgtgccctgcctttggcgagcccgacgtcgccgagaaggcccagctcatctttgccatctcgggaggtgcgttgccttgggttcagtctgtgcggcgacacttgctgatgtcgccttggtctgcctggtctcgtcacgctacagactaccgctcccggcgcttcgcggctcacctcctcattcctgccctcggccggaaggtacgtctaggtttttgtacgcagagtgcgcagttgtccggctgctgatcagctcccgccggctcctcatcctccgcaggtcatggacctcggcagcaacccggagcgggcggcgtcgttcaagctggtcggcaacacgatgatcctcggcgtcctcgagctcctggccgagtcgatgacactcgccgaccaggtaagacgtgtcgctggctctcatttctgtcactttgctctgctgacggccgtctcttctgcccgctcacagagtggtgtcggctcgtcgaacctctacaagctgattcagggtgcgcgatcggcctccgctcgctttgcaacacattttttggctgaccaccgatcccttccgccaacgatgcagagatctaccctgcgccggcgttcaccaactacggcaagaagctcatcaagaacgactttagcggcgaggagggcttcacgctcgatggaggcattaaggacgctgcgtgcgtctgatgtgcccgttctgagaccgctcatgagctgacaagagtctccttcgacctgcagccacatccgccgcctcggcgaggagcataacgtccccctgccgatgattgaccgtcagtccgcctcttccttctgccagtcgcctcgttctccctgctgatcctacgccgaatcttgccctgcatcagtcgcccaccagcatctcgtctcggcccgcgctgccggtggctcggacctcgactggagctcgctcgtcggcggcgtccgcatagcttccggcctcccggcgttcaaggacaagaagtcgcgcctcgagcggtacgagtagagcgtgagacacctcttcgtcccccacacatggcctcgcctgcccgactccttgatctccgacaactgtatgcctgcctcgacagcctgtccccttcccgcctccacctgtgtccaaagtcatgaagcttgcactgtcatgtcgccggtcagcgtggcgagcaggtcggcgagagatgtcaatgaagtcagcggtctcgcagccgaccatcgacgaccgctcgctgacagacaggtgcgcgctgagacgaccaaggcagagcaagaccaaaagacatacaggaaaaggaggacatcaaagatcacagccgaccgtctattttctcctgcccttccccgctctggcgccgcgaagacgacgcgggcttcacgtccatagggctcagctgcctggctagcgcctgttcttcgacgatagcctggcgtgcagcgaggctacgatctgacacagtcgctaacgtgctgagcacaacgaagcgactcgactcagctggtgtaacgcgcacacgaccgggctcgccttccgaaacctgccgcgagcgaggatgctgctcgccgccggggaggacagtgtcgtccggctgtgggactgtcgggacggcgcactacggtcggcagcgggagcaggcggaggtcgactcgccagcgggaatgcctttgcgtcgatggtgacgggtgtcgtcgacctggccgatctcgcgccgttggggaggaggtcgtttggccgtgaggccgtccagctcggcatcgtctctggccagcagtgggacctgctgggatcttgattgtgcgcatagacgaaaagggacggagggcggcgacggagggcggctttcgggtcggctattaactgagatgctagcatcgaaatcaccgagagtacaagtgggaatgcggtggggggtggggtaggttgattactgggagtaactagctgggaacagcacgagagagtggaaaaggagggaaaaacaaaagagagcgaaggagtgatctacgcgatggccttctcctcgtgctcgaagtggcggccctcgcccttgttggtgccctcgcggtggacgtaggtctcgttgcgggcgatgatctccttgcggtaggcgttcgacttgaggatcgtcgactccttgtagagaaggtcgacctgctcgagcgagaggcccttggtctcggggacgaagaagaaggcgaagagcatcgacagcgtgcaggtggcgccccagaggaagaagaccttgacaccgaggttggccgtcttgatcgcgttgacaccggtcgacgaggggtcgacgaggtaaggggtggcgtagccgatgccgaagttccagagccagttcgaggcggtcgacatggccatcgccttggcgcggatgccgagcgggaaaatctcgccgcagacgacccaggcaatcggtccccaggtcgaggcaaaggcggcaatgtagatgcagacgaaggcgatgaggacccgctgggcggtcaggttgacggcgcctccggcatcggcgttaccgacggtgacaccgacgatggcgacgatgaactcgcagatgagcatgacgagggcgccgtaaatgaggagcggccggcgaccgaagcggtcgatcgtcatgatacccgggatcgtcatgacaacgttgacgacgttggtgatgatcgtgatgatgaagccgttctcgatgccggaccggaggaagaaggtcgtgccgtagtagaagataaagttgatgccggtgagctgctgcatgccctggatcatgataccggtcatcgtccggaggccgttcttggcctcgccgccgcggaagcagtcgaggaacgacgtcttgccgagctcgcgctcaacgtcgagagccatctgaatgtcgaggcactcctgctcgacctcgaccgagtcggcggcgtggccggtcaatgtcgccatcgaccgcttggcctgggcgtcacggcccttgagaaggaggtagcggggcgactcggggaggaagaacatgccgccggcgagaatcgcagcccaggcgaactggatggcgatcgggatgtgccacgacgagtcgtttccgcggtccttggtcgactcgttgacgatggcggcgagcaggagaccgatcgtgatggcccactggtactaaggggcgggcaggcgaaaggagggcagaaggtcagcgacagaaaaggagacgacagcaggcaaaggcgcgggggaacgaacgaggccgacgatcagaccacggaaggccttgggcgagcactcggactggtacatcgggacgaggcacgagatgatgccgacaccgaagccagcaatgacacggccggcgaggaaggcgccccagttggagacaagctgaattccgatgccgacgcagaagatggcgcaggcggcgatgagaccccacttgcgaccgaggatgtcgccgacggggtaggcggtgagggcgccgaagaaagtaccggccgagagaatcgagacgacgagcgacttgtcggcggtcgtaaggtagtactcggacgggctgtcaaagtcggggaacgggccgaacgagccgaacgtctcgagccagggctccatggcgatgacacccgagatcgttccggtgtcaaaaccgaagaggatgccactgcgaaagggagggaggttggtcagcaccgggccgatgagccgagccagccggacaaaggcggacgtacccgaaggcggcgaacgaggcgagcaggatcgcgacggtcgtcgacttggactcaatgccgccgccggcgccggaaggacctccagcctggatggaagaagaaaaggatgagggtcagtcgaatgttgggccagagacatgaagagtaaaaggaaaacaatcgtgcgcaccattgttgtgcgtgtgtgttgagagtaaggttgaggatgaagagtgttgccttgcctgtcggggagagaagaggccttgagggcgccgagggcgtagggcggggaaggagagagggaggggagtggttgggagaaggaaagagaacctgccgctggcctccctggcgaggtcttatacgaccgggtgaccaggcgagctgcgcgaggggaacagacccgcgtcaaagggcgtctcgaacttcgatcgccagcgaccgcgggcgacgtctgaggcggcaaccggtctgggcgcgcgcgcgcgaagccgatgacgatgcggccctggcagaaaggagaggagcctgcaccagctcccgctgaccctgtcgtactttcttcatacacctctgctctccttgctcttccattcttgctctctcttgctctctctctctcgtgcgaggaggaataatacgctgcgttcttccccgccgtgggccctcggcggccctttccgtcgtacgaggaccccaaccctgtcggctttttctgaagccgccggcatgagcctcgaaccaaattccgcttgcggcgacggccggccgcgaggcccttgtttggctttgccgcgccggcaagcgcagccagcgaacgggccctcctgttgcgagctccaactgaagcctctctgacagactgacgtgggcgtctgtcgggcgcagggagggacgagcagcaagagaagcaggatagcatgcaagaggcgtcgtcggaccttcgggccgttcgtgaaggtgagagaaaggcgccccttgttggcagacggaggcacacgaggggcggcagttgcccctgccggggcaatccccgttcccgtcgtcctcccaccgtggcccagccgtggcccctcaaggcggcctcgaaacacacaactttcttctcgacgcgctctggccagcgcccagccggccgggtcgtcgaagaggtcggaagaggactgagagaagcagcatggggcgggaagccggtcgagtcgccgtcgcctatgcttgccttgcccgtcaccaaacctgacttctctacgcgcagtcaactgccgccgctcgtccaagagagagggctggcttacgagagggatcgacacgagcagtaagaaatgctccggcggcaacagggaagggcgacgcgccgacctgagtcgacctgtttgcgacgcgactgactagctagctgcatgggcacacagaccaacccactcgcgcgcagaaacgatcacgagggatctttattcgagagcatgcttccccagtcgtctgttgattccggcagccctgacccagcgcctcggctcccggcgaggcctgctagcaaggaataagtgcagcggcgactgcatgggcgcgagcgagagaggactgagagagggtccaggacggcacttggccgagaccgatcctccttgcgatggtggcggccgcccaccgccagttcgctcgcagatagagcaggccggccgacccgagttcgaggcacttgaagctggcgtctctcccgccgcagcaggctgacgcgagggctgacgagcagacacgagctgacaggcagcctgggcgccgaggagctctgtcatgtaacgcagagctgtggctgtcctgacgccgatagaggcggtcgcacgctctccttcttacacggtcttcgcacccccgcatcgagggcagcagcgacgtcgggccttcgagagcgcgaggcgtcgttgcggcaaggccgttaccggcgggccggcgtaagccactgccgcgggtcggtgcaggcagcgccggttcggcgatcgctcgttctcggcaggcgtgctcggcagagagagcaggtgcgtgcggaccgagctagctctgcttgccagacttgcgacagaagcgggacgttgccgccgccgcccttccttcacgaaagcgcagcagtcctgcccgagtctcgtcgtcgtcgtcgtcgcagtgcagcaggtctgttgcatcccgggacgtctgctgagcggtgggggcaacttcagggcgacagggacgggcggaggggaggtcgcgcgcgcggagggagagtgtcctaagggggagactggagggagaggggcgtttccggaggtgatgctggtgggtcctgttgtacacgtggggtcaaggaacgagcggccggtcgatacagtaggtggggagggcagagctgagatgcgtgtgtctgatcgtcctaagtgaggatgtcaatgcaaaggggaggggataggggcgtgaagaggaaggccacccgtcttcaacggcgggtcgagagggtcgagaggccgagccagcggtggccgcggatgccgtcaatcgtcagccggctcgccgggttgacgtcgaggcagcgcgtgatgagatcggccgcctcggccgacatactcacgcccggtcggaggggcgagcgtcggctccgctgggcgtcggccggcgacgcaaagggcgactcgccggtgaggagaatgttgaggaggatgccgagtgaccagacttcggcctggctcgcctcgtacgagccgccagcgagaatctcggccgcggcgtacgcggtcgttccgtagctgccgaggacgagaggggggttcagcatcttggcagagtgaggagggggcgacggccgactcacaactcgcggtagatgacaggcttgtcgccgtgctcccagacggcactcccaaagtcgatcagcttgacgcggtagtcgcggtcgacgacgatgttctcgtccttgatgtcgcggtggaatatgcggtggccggcaaggtagtggaccgtctcgactgtcgccaagcgagagagagaccggcgtcaggttttctgatctggtcgagcgaggtcggcacgacgcaccgatctgggtgaagatcatgcgcgagcggttctcgctgaaccgcttgtgggcctcgacgcactcgaacaggtcgcatgacccgcgccgctcaaaggtcattgacggccgctgcggcgtcggtgggccaaatgacgacggcggcgggccgaacgacggcgagggcgggagggcaaacgatggcgcgtagggcgacggcaaggggacgcccttgatcagggcgggcacataggcgctaaccgagggcgtgttgccgctcatgggcgtccccggcgtcgagggaccccacgacgagccgtgcagctcctggacctgcgttgaaggcgggagggctgtgagcgggcgcgcgtgagagagaaggaaacgggcctgcgagccccggctggaaacgcacaaggtagaagaacttgtcgtcggcgaagcaggcaaggccggcgacgatgcccgagtgcttgacgcggagcaggagctcgcactccatcgggaccttgcctccaaccggcggcatgccgtccccctcggtcccatgcgggccgaacgcaacccacgagtgagcggggactttggccttgagaataaacttgacggcaacctcgcagagctcgcgccggtcgagggcgatgcaaacaaagccaaagccgccagagccgagggttgagcagagctcgaagcggctgttgaagagcgggttgaggacatggtcgtcgagcaggtggggcgagagctggccgccatgaagcgtcgctggcggcgagagcgacttcttgagcgcctttgaagggagcttgagcagcggccgcgctgtcgcgtaggccggcgtcgtcggtggggtagccgtcccgctcgtcgcctggagagggaacgggaaagcgcccgaccgagcctggctgccgtagacagacgccgacgagatggcaagctcgctcgtccggctgccaacactcttgagcgggctcggccgcgagaggacgactgtcggcgaggcgtcgggcgtcattggtgcgccgccgttgccgagcatggagggcggctggacgaccggaaagtaggacgacgacggggccgaggtggagagaccggccgagccaccgggcgaggccgccgtcgaccagctggagggcttgtcgcgcctttggctgaggacaggccggccgatcgggctgccgaggcgtgacgggacgttcggcgacggcaggagcgaggacgccgtgcggtgcgccaggagcgtcgtcgtcgtcgtcgtcgttccctcggtcctctcgaacggcggctcgaagagcgccgggtggtcaaacgtcagcgaccggccgacgacgtcgagcgagtttgaccgggagaaggcgctcgagccgagcgagccgcgccgggcgaggagtgacggcgggacgggccccgtctgggcgctgcgcggcattcggaggaggcccttgcgtcggccagcagcagaggccggcgcgacgggcgaggtggtcgagctgactgacgacgatgacgccggcggcggcagcggcggaggcggcatcgaggacctgacaaacgacgcttcctgctgctgctggacagtcgttggcgagagactgaccgtcggcggcggccagcaggcgtcgtcgtcagccgagccggccgcagacgactcgcgcgagctcggtccgtcgtcgcttgcgagctcgccgtcgtcgtcggtcggcgagggcgcgaccgtcccgaagcggtactcttcgagcgaggcagagtgggggatcggcgaggggacttgatcccaggccatgggcgagtcgccgcctccgccgccttgggagggctttatgccgccgaacggctcgaggtaggctgtcgtcggctggagggaaaggagcggcttatgcggcgggctggacatggtgaaggtcttctggcgggtgcgaatgcgggtgcttgtcaggaggaaagggtgcggtcaggaggagaggaaggcgggcgcacggtgggagatggcgtcgacggcaggccaggtcacgagggcgtcggcggtcgagagctgccaggtcggcggcagtgggcgcgggcagtagctgagcgagaggggtgaggacaaagcagagaccggcttcctcgtcgttgagagaaaacgacccggacagaacgaggccttttcaaggcgatcttcctctcatcttgccggccggcctcttgtgcgcggcgtctgctccgagtcccgggtcgatagcgggagcaggtcaagcaacggctgcagagacccgtccctcggaggggcggggcaaggtgaaaggcgccgtggctgaggtgcctggcgacgcgtcgtcggccgggaggttgagtgaaaggagagcggaaccaggcgggggcggcgggcgagcgagctggcctgaacgctacttgtctgcttgttgctttacacatctaggaggagctggaggaggaaaagaagttgcatgggcgaaaagagagagagagagaggaaaggcacaagtgtcgaggaggccggccagccgtcgatcgttaatgacctcagtcgcggccgagggaggcggaggaggcagacgacgagggcgtgccttgcggctatcacattcggccggcgagctgaagacaatgtcggatgcactcgcaactacagggccagtggtggaaggtcagtaggaccgacgagtgagcagggcgaggcgatggtcggggcgaacagggagcgagcgagcgaggtcggcagcatgaacctggcgcgcagccgaccccgacatgctcgcccctccctccgaagctcatcaggatcacatatagcagagctaggggtcaaaagagcgagggcaggccgttcaatctgcgacccgaattgcttcgaaggaaacgttttatcggacgggaacgggctgctgctgctgctgcagccgccactcgacgctcgagagccgacgaccgtccatcagcccgtccctcctccctcctcttcaaccaccaccgacgacgcctacagacccgcccccttacaagccgacatgaggctctcgctcgcactcggccgccggctgccgctcgccctccttctcctgctcggcctgctcttcgtactcctcctccccccgtcgccatcagcgcttccaccgaccgcgctctcgctgacccctgcttcatctctcccgcctgtagctgacatcttccgcccacgccgctccgccaacgacaagcggcgaggtccgttcctctccccgatacccctccccctcattcgcttgcgagctatcccttaggtgggtctccaaacccctgatgtcccgttcctcactctctagcgcacacgcaggtcacagcaagagagttccatttgagattggcgtgcaaccggcagttctaagagggctacagtagggatcgcccgtgggcgggggtgacagacgtcggctcggccgcaacgcttcagatggcggcgagaaggtcgtcggcgcccgtcttcttgagctctccgggcgagtcctcgacgaggagcgtcttgatgacgccctcctcggcgtagagggcaaagcgcttcgagcggatgccgccgagcagacccgaggcgtcaaagacgaggccgaggctggcaaggaagccgttgtccgagtcggcgacgaagcggaccttggtgccctcgggggcgagcttctgcttgaacgccttctggacaaagacgtcgttgatcgcgatggcgtagatgtcggtgacgccctgccgatcgcgcaaggaaacagtcagcacacgcgctcggtcggaatgggcgcacagcggacgcaccttggcggcgaaggcgtcgtagttggagatgtacgacgggacctggtcagagcaggtcggggtgaaggcgccggggtagccgctggcaaaagcggcgagcagcaaagacgtcagcacgcggccgggtgtgatgcggcgtttgcaggcggcggatcacgcacacgatgacgatcttgccggcggtggggatcgcaaacgacttggtcgggtcgtcctccttgatcgggaccgaggggatcgacgagccgacctctgagagagaaacgcaagagacgggcggtcggtcggtcagcaacgggggcttctttgcgggagagagatgggctgaacgccgtcccctccgagcgggcgggatttcgacggtcacacgcactggcagcgaggagtccggcggcggcagcggcggccgacttggaggcgccgacggcagaggagaggatggcagacatggtgagtgtaggtaaaagtagaggggagagggcaggggagagtgatggttgaggacgaggaagacacagacgccggcctccgctgacgaacctcgcgctaagcgtaatactcgcccccatgcgttacgcttcgaaaaggcccgtttcggcgactgaacgacgaccgcgccacagggaacgaccatctcccagaccagcagcctagacttttgtgcgtgccctggtatcaagggcgcgccatgccgtcactgtgtcgattactctgtcgggccgcgactgaccagccaggacgctgactgcagcgaccgcctcgccccgctccgcgcagccgacctcctcccagtcgctcctccgcgtagctccatcgatgctcaacctagactactcttcgtcggacgaccaggaggatgagactaggtcgccgagccctccgaggccggctaaacggtatgtcgtactgtcggtcgggcccgtcgtttcagtactgattgaagcgcttcccttacctgtttagacgaaaactcccgccgttaggaggctcgttcgtcgacgaaggtgaggccggcctcggctgtgaggctgatctgcacggattgacgagctgacgttgctgttttgaagcactgccggaggacccatcgaagcaccaagggaggacgctcgcacgcgcaaaggtgatcggcgactacccgacgcatttgtacctttcttgtacgtcgcctgccttgcgcttctctccctttgccggtgacaacccacaaaccgtgctccttacagtcgatgttcctttctgctttcgcgccctcgtcaaacatgcgcgctcgctcgtgcccgagctgcactcgctcatcgaccgaccgaccgcctcttccccgcctccctcaagcgactctcctcgaccagatacatcctcgaaggcgttatcctggctagcgctgcacgtctcgctcagccggccgctctacgtccgcaaagagcagcggccaaagctcgaggccgacctgcgggacgccgttcatcagacgccggcgttcgcgattagcttcagcacgctccgtgtcctgcgaaacgacgagcagacgcggctctttctcggcgtcgacgtggccgctggctatccagaggtgcgtcgccaagagagccgccggcttgacacattcgacctaacgctgtgaccgcatcctcatcggcagctcaccgccctcaccgaccgcctgaacgccgtcctccgtcatcaccacctgccagtttactacgacagcccgatcttccacacctcggttgcctgggctcttcttcgccctccagacggcgacgcttcgaaggctactgcggagtctgagaagaaaggcacgccctccgttccatcgatcgaggacctgccggccgacgtccttaaggtgctccagacgaattgcggaccgatccggaagctcggagggctcgcggtcgacggcgttcggatgaagtacggcgcggaagagatcgagctcccgctcggcgacgcctcgtgacatgcgccttggcccggacgttcgcgcgacgcttcaagttgaaggcagaggccatgcgattcaggaggcggtgcttttgagggataggcgagaaggcgccaggaaaggggggtactaggggtcacacgtacaaggaggagagggagatagagaaggaccggaagatgctgcgagaaaaacaaaaaggggcggacggaagtgacagaaggggagagcctctactcggccgtgtccatcgacgtgtgcttgtaaaagttggtgccatgcgtcgtcgccttgacgatgcctgcgcggatgacccagtcgccaaacttctcgtcctcgtcgcgctccttcgcgtagcggccgataaagttttcgagcagcgcgagaatctctggctcctcgaccgactccttatagatcttggagagccgattgccggtgtacgatccgcccatgagcatgacgtacgtgcccggggccttgccgacaaaagcaatctcggcgttccagggcctgcaggggaggaaagaggggcgggtcagctttgaacgcacaagcaaacagtcagggcctgtgacgcgggggaccgaccttgagcagccgttcgggcagcccgacatgcgcatgacaatgtggtcgttgcggaggccgtgcttctccatgatgagctcgaccttgtcgacgaggacgggcagatagcgctccgactcggccatggcgaggccgcaggtcgggaaggcaacgcaggccgacgaggcgtgccggaggccagagtggttgatgttatcgagcttgtacttggcgagcagcgccttcatctcgggcaggctctcctcggggacctcggacaggatcaggtgctgattggccgtcaggcggaagacgcccttgtggaccttggcaatctcgcgcaggcccgtcttgaagctgagcccgggctcgtcctggacacggccgttctcgataaacatcgtgaagtggtgcttgccgtcaaagcccttggcccagccaaagtggtcgatgttgtcgacaaacttgaacggccggggcgggggcagcttcttgccaaagcgcttctcgacctcctcgacaaacgtcggcaggccgagccggtcaatcgtgtacttcagccgcgcgttcttgcggttggcacggttgccgtggtcgcgctgggtgaggatgacggcttccgatatcttgaggccctcgtccggggtgatgaagccaatgacgtcggccagccgggggtacgtcttggtgttggagtgcgtgacgcccatgccgccgccgacagtgacgttgaagccgatcagcttctccttcttctcatcaatgatggcgatgaagccgaggtcgttcgtaaagatgtcgacgtcgttgctagataggggcaggcaggatgtcagcggcagggaccaagtagccgacgacaagaggcaagagcaaccactcactgaggcgggacggcgattgacatcttgaacttgcggggcaggtagtactttccgtacatcggctcaaagtcctggacggcgtcgccggcaaccttcttcttgtcgagccaaacttcggcgtaggcgttggtctggggcagaagctcgtccgagagccacttcgagaagtcccagcactcctgctggaagcgcgagatcgaaggattggccgcgcacgtcaggttgcggttgacatcgccacaggcggcaatcgtgtcgagcatggcccggttgatggcctggatcgccggcttgaggtgcttcttgatgatgccatggtactgccaggtcgcgcgggtcgtcatcttgagcgtgccgttgccatgctcgtccgaaatctggtccatcgcgagccactgggccggggtagcgacaccgccgggcagccgaacgcggaccatgaacgagtaggcgggctcaaggccctgggcgacgcgctcctcgcggatgtcgcggtcgtcctgctcgtaaatgccgtggaacttggtgagctggccgtccgagggcgcgagcgcgccggtcgaggtgtcgacgagaccctcggcaatcgtgccgcggaggtagttggacgcaatcttgatgtgctcgttggtgatcggctcgggctcggcctcggtaacctcaaccttgtcgacgcccatcgccttccagagcgtcggctcccagatcttgtagccggtctgggcgccgtcggcatcctggtcgtctccgagaccgatcggggccatgcgctcggcaccgagctgctcaagcttgacgtcgaggtcctgttggcagagaagggcgacagcgtcagtgggctgggggcagtcatgtcgcagcaggggcgacgcacctttccgggcttgttgtagtagtgcgcgtcctcgggccggggccagtagtgcgagtcgcccatggcaaagacggtgaatttgagatcggcgctgaagagctgttcgcccttggcctgggcagcgttgagagccttgaaggtcaggcgggcgttctggggcgcctcgccctggccggcggtcgaggtgacgacggcgacgtgcgactccatcttgaggtcctcgagcgggaactcgtcgagcgcgatgcagcgcgtggcaaggccacggaggccggcccggttcgcgagccgcttggcctgcttctcggccgcaccgccgtccgaggcgaagaggatgaggagcggcgggccgtcaaaggcagagagcagcttggcgtacgaagcctgggccttgtccttgcgggctgtcaggagccgctcgccgagcgactggacgaggtccgtcgcaagggcaggctcggcgttggtgagctgcgacaagtgctgctggcggtcgaggaactcctggagctcggtcttgatgttctccgagtcgagcgtgaagggttcgcggccggcaacctcctgcgaagggtcccaccggtagagaggccagtagccggtgtcgacgccgagcttggtctccttgaggacctcgagcgccgtcgcgtcggcctcagtgtaaggcaagtaggcgaggacgactgacgggcccttgaacttgtcggcctcatggaaggcctggaggacctgcgagtaggatgagtagacggcgaccgaggcaacgtaaacgttgccgtagttcatcgcgtacaggccaatgtccttcttgcgcttgttggcgtcggcggcgttgcgcttggtgtaaggcgtggagtcgatgataagcaggttgacgttttcacccgaggcgatcgcgtggtgaacaccagacgagccgaggtcgtacgaccaggcgtctgatccaatgatccagcgcgaggccggcgtgacgagctctttaagagagagaaccttctggccgggcttcgagtgggcggcgtccgacgactcgagaaccgtgactgccttggcgccgagctcaaccgacgccggctcgtccttcttgagcagccaggcggcaaaggcagcgtgaacggccttgtcgacgttgtacgagccgagcaggcccttgacggcctcaatcagctcctcgcgccgggcgagatcggcccggaccttgccgagcgcgtactcgggctgagtcgctgccgcgccggcagcctcgacaagcgagggcgagttagagatctcgagccggtcggggaagacctgctcaagcatcttggtgtaggccgactcgagggcggggacgacgggcgcgacggccggggccgagggtgcagccgggatcgagccgaggacgagcgccttctgcgagccgatcgaggtgatgagggcctgagcctcagtctcgagctgaccgcgtgagaggcggcccagaacgccgccaaagaccttcggcggcgcctcggcaccctcctgctgataggccgagacgacgtcgaggtagaggccgctccaccgggtcgtcttcttgaacgactgctcgagcacgatgacgttcttgacgtccgccggcagagccgagacgaggcggaagggggcgacgggccggaggaggaagacctcaagcacaccaaagggcgcgtccggcttggccgcaatgtcgacgagcggcgacgactcggtaccaaagacaacaaagacagtcgcggccgattgcgagccgtggtagacgtaggcccgctgggggcggcgcagaagggcgagcgtcgagagcgaggcgcgctcgtaggcgctgaaggcctcggggaccgggtgggcagcgtggccattgccgttggcgtgcttatcctcgggcagcggggcgtcaacaaactcccggaccttgtcgtcctcgacctcgacaaactcgtcggccgcgtcgatctcgaggtagacgtggaggatcgcgcgccgcgcctgcttggcgtacttgagcgcaatcaggccctggtcgtgggcgctctgggcggtcttcgacaggacgatcgcccagccggacgagcggagcgcaacaacgtccgacagatcggaggtcgccgggagggcgacgtggacggccgtcggcgtctggctaagcgtcgagagcgacgggatgagcgaggtgaaggccgacgtcgaggcgagcaggatcgaggtcagagccgacgtcgaggcgtgccgggcggcgtggaggcccggctcggcgtgcgggtgcagcgtctcgatcgtcgccttggacgacgaggcaatgttcgagacgccggccgagccgacgacgacgacgtccgaagccagggacgcgagccggccaacgatgtgggaggaggcgggcatcgagaggctggcgagggtggcgaacgggccaacgggaggaggcgaatcggtcaggtctcgcttcggaatttggcaggatcggcgggccggacgcaccaagagcgaaaggcgctcgtagcagaagaaggggagaaagcgggcctggagcgggggagaagcgcgtcctgccttgtagtgtagagaagggaaggtgaagtgggtggtgggtggcggaagggaggaagggaggatcggggacgctgtgcggccgtgcttgtgcctgcgccgccaccggagtcgcgcctcagcacgccttttcagtcattcggaaagaggacgaggcgacaaaggagtcagcaaccgacggcaaaaggtccgccgatacctcctccctcgctgcagggacacaggggccgagcaggccgatccattctgaaagaaaagtgtcatgacatgtcgtagagtgaaaagaagagcatagaggagaggctcggggagcgcgtctccagttcgttgagtgctctggttggctggcgcggctgcagccggcggcatttcgcgttcgttcgcctcggctaagcacgagcgagcccggcacggtcggccgggccgagcggcgcaaaggccatcgacgagtcgtcgaagtcgaaccgggcgaacgacgtcaagacgacccgccgacacaaggggctcgtcaaaacatgccagacctgccgccgtcgtgctcggacgggtgcgacgtcggaccagatcgaccgctgggcgagccgacaaccctcggcgtctgcggcacgccgtcgcccgcggcgctgcctgcacctccggcgggagctgctgccgagggaggctgggagccgatgaaccaggacgggacccagccgcgctcgccggtgctctccttaatggcctgtacggcgagtgaaggggacgaaaaagccaggatcagtacgcgagcgcgagttgcagggcgaaaggggcacgcacgtaggaccagtgggagtaacgcttgtaaacccacatggcgtcgtccttgtcgaggttcatctcgtcgccgcccgaccgagtgtagctcatgagcgcgacgccaggatacgacgtgctgaggatgtcggccaggcggagcttgccgcgcccgctgctgaccccgccgtgctgggctgcgagcgcgccaaagacgccgcctgaagcagccggcgggcgcgagagttcgagtaagcacccggccgggacccagccggcgagagcagagtctggcgtcgtctttccggagccgggggggtcgcgctggacgatccaccagcctttggccttggaaaggaccaggaaggtgtcgtcgcttttgacgagagaattagtgttgatgcgagaggtaggggtcaagagagcgaaggtgacgcacacgccgaccaggaactcgtcctcacgctcgggatcgtacggatctggcaaaggcaagaccgtcagcggtgtccttctagctgcagaggcccatacgggactcacagatggcgaccgcgtaggtcatcttgtcttccaagttggcgcccgactctccgaggccaagcactggcgcagtggtcgccagggacgaggttgacgccgcgacggtcgatccactcgcgtcgcttttggcgggaagcatggactgtctcgccgacggatgagggttggccgatgcggccggaccagggccagccagcgacggctcaccgagaagatctgtcgctgcggacgctgacggcgacgacgatgactgctgctgggcctggattctggcagcctgctttgtctgggcgagcgtgatgggcgacttgatgtcgcgctgcggatggcggatagataaacaggtcagcaaggccattcaaggcgacacgagagacactctacacagcgcacgatgtgccgcagcatgaagacgggcgattggtcggtctccttgagcttttggaagagaaggagcggcttctcgtcgtagctcaggcatcgctcggtgccggtccccggacctgagtagccaagcaacaggaggaggtcagtcatgtccacgcaagaacaatcatccttctgacagccgtcagaaatcacgactcaccggtcgagccgtagcagatgaacagcgcgtacatccgccagtcgtcctggatcttgtactttttgagcgcggccggcaggaccttccagcacgggtcgtcgagcgtcactttgaacttttgcgggttctgggccgaaccgagcgccgagcctgcccggctgacttctgaaggagcggctgaggccctcgctgacgaggtgttgagcggcgcagtcggtggcagcgaggtcgacgcaggcaggaggggtgaagagtcggccgccgcaaccggtctcaaggctgggttagatggtgtcgatggcggaggctctcttgatgacgatgcctgtggtccaagtgctgcttcggttgcggtacttgggctgacaggcaggcccgaccggccaggaatgaccgacgtcgccgtcgccggatgaggaatcggtagcgtcgccgcattcgtcggcgtctttgggctgacggcctcgctcgagccaaaggttgacggcgggaggcgcatctggccgcctagaggactgctcgcacgcggcccgagctgttgctgctgctcgtggctgccgtagccagcgtctccgtccatcaccccacgaccagagggatcgagctcaacgctcgatgcgagtgtcggcgagaggcccttcgacgccttgcgaccgtacgacgcccacctgaagctcggctgcttcttgagccagcccggccggtgtgcgccgctggcagccgttgccgacgggtggtcgtacagcggcgtctcgaggctaagagactgcgactgcgctttcgacgtcccgccggtgatgggcggaggaaacgtgattgagccgccggtgagagacatgatgacctcttcgagatagttgatgcgctcggctgcggtcatccggtcgaacgagagggcacgggcgagtcagcatggcatatggagaagttaaggtcccggcgagcgacgcgcactctgctcggcaatgaggtccatgacgctatcgagatcacggctgagctgggcctcgtgcgcctgcgtcgagcgcacggagggcggtgaggtgccggccgtcagccgccagcttgcgagcgacgtgtcgccgtcggcgtgcgagctcgagtctaagctcggccagtcaaagatgggcgtcagcttgggacgctgcctttcgaacgagagaagcgataagacacacagctcctgtcgtactcgttcgcgtcatcgtgggagctgctgaggccctgctcgaccttcagggcctgaaccgccttgagcacaccgagccgcagcccgaggctggtcaagccgacgtcgcgaaggtcgtcgctctccatcatgacgaggacctcgcccgagatgccatgttctggaagggtggcgtccagctctggtcagccttctatccgaaccgctggctgtacgagcctggagatcgccaaggaagaagggagagcggacgcaccccgcagggaggccgaaaggtcagggcagccggacgagcggaggaagtcggcgacatcgtcctcgtcccagtcgagaagtgaaggcggtgaggagccggtggtcatgctcgacaggcggccaggaaaggaaggcttgagaaggcgagaggcgagagagagctctggtacaagggctgctgggccgcaaggaggggcgcctgcgcgccgccgcttcgcctgcggggcggccgaaacgaattgcagcgagctcctgaagccagctcttctcctcttcaaccacttccgtcctctcatcatgtcgcccattccgtccgagacgctccttattgcgtcgtcctcgtcggcgacggcgtcgggctcaacgacgttacacgagttgtcgacggcccagctgctgctcactctcaagccttcgtcggccctcgccaactgcacggcgagcgtcccgacccggcacggcaagggcggcatcgtcatggccgtccaggagggcaaggcgctcgccggcgtctgggcctggcagaaggttcgtcgttcgcagaatccgtttgaggcgggccggcatctcctggctcgtcggcagctccgtcgcagctctcgctgaccagggacgctgcgccttgtgtcgccgctgcctctcctccctcttaggaccagatgcagcagaagatcccgctacctgagaaactctcgtgctttgcgctgagtccgacgggcgcccactgtgctggaggaacgatctcgggccacgtctatctgtgggaggtcagtcattcgcttcggcagcttggaccctgctgcacaagttctaacgcccactcctgcatgcaacggctcaggttgcctcgggcatgctgtacaactcgtgggacgcccactaccgaaaagtcaacgtgctccggttcaccaacgacgggctcggcctcgtgtcggcgagcgaagacacgcgcgtgtcgatatggagcgtctcgacgtgcgtccctcccctccccgcaccgcgcgcacccagccgatgctgacgcagccctgcatcccgcctcatgacagcctcgtcgacaattcgcggcagaaggatatcccgatcccttatgcgaccctgaccgaccacaccctgccggtgacggcgatcgccctctcggcgacgggctcgttcccgacgcacacgcgcctgctcacggcctcgctcgaccacacggtcaagctctggtcgctctcgtcatcgacaccggtcctgctcaagtcgtggcacctgccggtagctccgacgacgctcgcctgggacgccctgcagcgcggcttctgggcggccggcggcgacgagctttggggtgtcggcatgtggttggcggatgacggcgaggatgctactgggggtctctcgcgcggcaaggagcagggctggcggggcgagctcaagcggctcgagcgagagggcgagggctacttcaagctgacggcggctggcgagaagaaggagccgattacggcactcggcctctcgttgacgagtacgacgctgctcgtcggcacggcttcgggcgcggttcacacgctgtcgctgccatcccttcagccgctcaaggtggccaacccgcaggcgcacaagggctgcccgatcacgctgctcgaggtacagctcaagccagcagacctttacggccaggtccagctcgggagcacgacggccggcgcccgcgacgaggtcatccgcaaggtcggccagctcgagcgcatgcgtgtcggtcggcgcgagcgcgaacgccatgttatcgaaacgcggctcggctcgtgcgaggacgtgagttgcagccctggcgtttcaaaaggttgctccgatgcaggaggctgacccgtcgccctcctcctggacggcttccagatttttgaccttctccctcagccggcaccgctcgcgacgacatcgtcttcaggcgcctcgctcgcaaactctggcccctcaacgactgcgctcgaggcgcagattgcggccctccaggccgagctcgctcaggccaaggcgacgaacgagaagatgtgggccggcatcgtcgacggcgcgctccagccgaatggcagcacgggaccggccgtgaacggcgagggcgagacggcccaggcggcgccgtcagcggcggttgcggcgctggcgctcagtgcgccgaccaagaaggcaccggtcggggccaagaagcgccggagatgagcggccttgctgccagggaatgacgagcccatgacacgtccagtaccatctccttgacgagcagtctgaaagcgagaaagcgagagagcgtcaggcgtgtcgagcatgaagtgctttgtcggcggcgtcgcgcccgcccagcaacgccgtcgcccagccaacgtcgactcacctcgccttgccaaccgcccctttcgccctcccgtctccctctctcgacccctttcagctcatctcgtcaagcactggcgccatgtcgcagatgtcgggtccggccgacgagtcggacgtcatctcggccctgtcggccctcgccaaccaggctgagctccatcagggcggcccgatcggcggcctcagcagcagccagccgacgcacgtcccgcaagacgaccaggtccgtcgccctagctggccgccgtcgagctcaaacggaaccagaagcatagctgaccagcctctcggacgttcccttccacccgccgtagctctttgccaccgacgccccgctgccgacgtcgccaggccagcagctgcttgacctgcccgcgagcgactacaacgggctcgccttcgccgccgacaaggaccaccggctgcagaagacggctggccaggacaacgcgttcgatgcagacgccgtcctcgagcgctactaccgctcgggcgctggcccgcccgagggcgacatgatcatcgtcgcggggccttcgtcggcggcaggcccgagcgcagttgccgtcgcagcgatggccgaggcaaaggccaagacggtcaagctcagtcagtcgctttcgcctcttcctgctttgcaacccatccgacgacaatcactgatcgccacgagctttacccagccctccagccgtttgcgaccgagtggatcaaggccaactacgaggcgcttgagacgtcgtccgtcccgcgggacgccatgttcaaatcgtacatggcagcctgcgagtcgcagaacatcagcgtccgtttgcctttcgtccgaacttctgctggaatctcttctgactgcgttaccttctccatctgtcagcccgtaaactctgccacttttggcaagagcgtcaaggcagcctttggcgaggggaccatcaagatgcgccggctcggcgagcggggcaggagtcgctacaactgcacgtctcgcgctcaacctcggcgtctgacccttggcagagcctgacccgtctgtcctatgaccgacagatagtggcctgcgcccaagcaatgtcgcagaagaggagaatgtccgcaagcttggccagatcgacgacgtgcctggcgagggtggcggggcttcgaagggtgctcctagctccaacgaggaccgtccgctgagtcctggccctcagatcgacccaactctcggccagcgttccgacggcaagctacagccgctcgccgatccctctgttgcgcgcgacaagggcaagcggcgcgcatcgtcaggcttgccgaatcactccagcggccccgagccggcggcgaagagacctaggcgggaatcgcctccgacagattggtcgagcgcgacgcaggagggtcgctacatcgtcgctctcaacaacgcattcgagtcaatccgcgaggtcgtcccggcgctgcgcgagtcgtgagttgctgacatctataccaagttacttaccaatcaggctgaagcttgttcctccccacagcgccaacagcacaggcttcatcgacggcctcccggtgcctcgcacgaatggccgagtgacgacgctcaacctgacgcgggactacatcatccaccttcagcaggagcgcgaagcgaaccttcgcgaccgcgagcggctcgagcgcgatatgcagagcctggaggagctctgccgtagcggaggaggcagcgaggagggtctggccgagtggcggcggacgagggacgatcctgaccggccgcatccgccgctgctgccgtcggccgttccggctgaggacccctacaacctccaggagcagcaacggcagcacgacgacaacctcgccagtatcgaagcctttgcgcgcgaggagcacagtaacctcttccactcgccgtcgatcgaggaccagctccagtcgctgcaccagcatcagcagcagcagcaacaactcgacgcccagcagacgcacgtcgacgacgaggacgacagtgctgcccatccagtcgacggcaatgtctttggctacctcggtcatccagcgtacggacacgacccttcggcttcggtctcaccgggccagcatgcgagcggccggctcccgacccccggcgactcagtcgccttcctgtcggccatcgcaggcgagccggcgtacacgtttgacccgacgaccggctccatgtctgaggacgccgaggagcgccggcgggagcgcgtccaccgcgaagtgaaggagcggaataaagctaagcaggcccgctaccgggcgaagcagaaggccaaggtccagacactccaggccgagaaccagcgcttcaagggcggctcaatcgaggccgacgacgacacccgcccccgcagtggtctcgacgcccagcacccgcacgagcagcacccccacgcgtcacacgaccctcagcagcagcaacagcagtcgccccaccagcagccgtctgagcaagccgcgctgcacgtcccaccaggccgcgccgccacggacctcagccacctggtcctccatcacgacgacgcgatgacgcccgaggaggcgcgcatgctcaacagcgtcgtcgacccgtcgctgatggagggcctggacgaggagggcaacctggccgccctcagtgggatgaacgctgtcgatgtcggccacgatctgacggagtatcatgcctaaggggtagggtctcctcgagcaaggggtcggcgggttgatggtgggcttatccagggcgagtacatagcaacgactcatgtcttttcacgtctcgcgtcattccagacagggaagaggatgagcgaggagagcagcggctcctgctttgtcgcccgcctcttgtgtgcgtcgagcggggtctgcgcacgtccgacagtcaaagctcgctgaacaagcaaggatgaagggcacggtgccattggatggcaggcaaaacggagcagctgctggtggtacagaaagtctacagattgacgagcggaacaaggggggtgtccttttgggagcagtaggagacagggcgggggtgggagcacacagaggggcaaagcagaggggaagagagagagagagagcgaagagggaccaaaggaaggctcgctctaggccttggcgagcgacgagaagaagaggaagaagtcgacctggctggcgttgatgccgttgaggtagacgtggtggctcgagacgtaggccgaccagacggcgcggagatagggctcgggcaggcgctggatgagcgtgtcgaggccgaccttgttgacgagcgtcttgggcatcgccagctggaggaccttgcgggtgctcgcctcgagctcgtacaggcccttggactcctcgagctcgacctgaaggacgttgagcgaggacgagagctcgtccgagaggagcgtccgggggacgatgccgttgcgccggtggaactcctcccagatgcacttgaactcctgctggccgttggtggcaatcatctgctggatgtctttgacgtactcgtcgtagaaggtgccgttcttgcggatcatcaggtcctcgtactcctcgtccgagaggccgaggccggcaaggacctcgagcgaggaagacgtgacgccacccttgtttgccgacgagtccttgaagacgacgacgcccttcttctcgaggtagagccgggcctgctgggtgaagaagaggttggcgccctcgacaacggccttgaagtggggcttgccgtcggcgtcaaagagctgggcgacattggtgatgttgatcgactcgggccggccgccgcaagggacaaagatgtcggcccggaagcggaggtgggcgacgttgcggaactcggtgccgtcggtgacgggctcgcccgacggtagcgtcacgtccttgtcgtcgacacggatcaggtagccctcggggccgaggagggccgtgtcaaagttctcgaccgggacgcggagcttggcgagccggaggagctcgtcgtggttgaggcccttggggtcgtggaggacgcccgagccgtcgatgatggcgacaatcttctcgttcggcttcgagagaagaatttcgttcgagccgaggtcgccatcggggccgccagtctggaacttggtgatgtccttcgactcccagccgagggcgtggtagatgccctcgacgtactgccggaccgagagcgaggtcatgccgtacgtgtcgtgggggatgccaccgaacgccttggccgacttgccggtcgtgaacgacttccagaaggacgcctggcgcgagcgggcgtggccggcggcccaatccatgaagccggccgtgccctcgtcgggaccgaagaagaggacctccggcgagccgaggaggtcgacgatagggcccttgatgccaggggtctggccgggcaggagcaggtcgaggatcgcgtcgacgtagtgctggaagcacgtctcggggtcggcgccgagcgagggcaggatcgtacccttggcgccgccctccgggatgtccttgttcttgagcgcctgggtggaggcgaggccgtagttctcgtcaaacagccggcgggcgttgttgttgtactgctccttgccgcgcgagcggatgatgcggatgccgccgcgcgagacgtcgcggaagcggatgtggaagccgcggaagtcggagccgacgacgaggaagaggccgtggggcatcttggggtactcgacctcgggcaggaagctcgggtcgagccggaacgagagggcgagcttggtcggctggtagaagttagtcttgaggacgtgcttgttgaagataaggaaggcctcaaagatctggacgtcgtgcgggttcgtgaccgtcttgcggatcttggcgtagagctcctcgttcgaaagcggctgctccgtcttaagccggaggtacgacagcgtcggcatcagctggagcgactcgtcgttctccgggtagtgcgtcattgcaaagttgaggtagagattacggatctggagacggaaaggacggtcagcgacggccgaggagacgaggcggcgcagaaatcgaacgcacgagctccgggtgggccttgatgacgtccttgatcgactcgcgcgtaaacgtctcgtcgcggaaacgcgtcttgatgttgttgaggacctcggcgtggaccgagttggactcgtcgaggatcgacttgagcgcaatgtacgacgtgccgagccggttgcaaaagtgctgggcaaagatccagccgacgtaggcgtaagttgcctcctgaacggcgtgaccgtcgccggcgccgtcggacgagctgaagaagacctcgtcgggcagggcgtagaggagcgaggcctccttgatgatctggtggatcgacgtctcgatcggcggcgccttggtgttgggaacgttcttgaggtagaggttgaggacagtcgtgccgttcgagaagtgctcgacatacttgcggggcgagaagagcgagtagtagtggtacaacttagagagcgagctgaagaagttgcgggtgccgcccatccggaagccaatgacgacgcgcatctcgcgccggtcctcgacttcgtagacctcgatgacgggcgcgccgccgcgcttctcgacctcgttaatgacgccgaggtagatctccttggtgttgcccgaggccttctcgaggaagtccgggtccgagatgtcctcgatccggtagccgaccttggggtcaaagacctccttcggcggaggcggcaggcgcgagcgcgagaggaagtagcaccgaaccgactgtgtcgacgtcgccgagagggcgccggccgagcggtacgtctcgagccggtaagacttctcgggcgttgagccgtcgagatagagctcgtcgatcctgggggaacgcgaaagagaggtcagtctgggctgcgcgcgcgccggacgaggtcgagagcaacacggacgaaccgcttctcgcaggtcgcgccaggaccctcgtgcgccgtcttgccggcctcgctcgtgtgtataaagatggcgcctggaggtcaccgggggtgcgaatttgggtcagctgactgctcgccgccgggaaccaaactctcgcccgcgcgcgggcgcgcgccaggcgcagctgagctggagaagtgactgaccctccttcttgccctcggcctcgggctgaatacgctcgaggtcaatctggagcttgtcggcagagtgcttggtgaaggcgaggatcttggcgccgtagctagagcgcgcagagaggaggggcggggaggacgggtcagcgatggcgccctcggcaacacccgcccggcggcaagcgcagagaggacggacagggccataatgtgctcggcaatgatggccggctcctcgcgctggaagtaggtggcgtcgatgccgaggtgcctgtggcgacgaagggaacgggtcagccgggccggtcttgcgaggaagaagcgcgctgacacgggcggcagaacgcactggtagaaccactcgacctcgcctttgacgaggtcggccgggataaagccctgctgcgagacgaggccctcgacagtaccctgctgggcgtccttctcggggtactcattcggccggtagccgatcgtgtccttcctcagcctgcagagcgagatgggtcagcggctgttggggcgtcccggcgagagagagatgcgcgagaacgatgcgcaccggtgcgtcgacgcctcggacgaggctcggctggaggatgttgaccgctcggcctggaggccgggcacgcgcagagcagcgttctgagggatgacagagtcggtcatgttgggaaggtcgttggggtttggggttgggggtgatggtgagagagagagagtcgtcctcttgccttcttgaagtgccctgcgaaacggaaacgacttgtgagcgagagccgaggctgaggtttgccccgcgcggggacgacgcccaacgaacgcccctgctcacgagacggcgcgcttgggccggagggccggtcaaagccggcgcgtaagtctgcagccgctccctgctgttcactgcgcttgcttcacagcagacgtgcgtgcggacgacgaggcagcagcgactgcagcgatgcagacgacaggcgccctcgagcagaccctaagaaacgcgacgaacagacgccagcagcttcagcaagcacatcatctttccttcctgcaaaacctgcctcctgcctgtcaggccttgttgggcgaggaacggtcatgcgagggggcgcacccgggtcgtgacctgggctttgacccagccagccagggtcagctggtctcgctaaagacgaatcggtcccccgccgaggccgtcagctgcctgccaaccccgcggggcacgcacggacgcaccgttggccaactcatcagcgacctgctgctgaaccgaaaaggccagcaactgggttggtccctccagcacgagcacgcctccgacttgcctcccacctgggcccgaccaccagacgcgcgcatcctgccgtcacgtgacccccttttccaccctctagctgatctggcgactttgtcgatgtgaccggcacctcaacgaccgcatgcggttcatcttgtcgtgctgacacttcatgatgatgtgctaaagagcaagagggcgtcgaggtgggtcttggtgtgaaaaggggcatggtcggatccgacgagccgtcgcagatgttgctctgacgtcgtgccgtttatcgaaaggaggttactgaccggccctgccttgcttacccgtcagacccctgaccctcaccaccaccgccgagcactcaccctcttctaagccactctcacgccagcatgctcgactaccacaacgccgtcggcaccctcccgcacgcgccgggcctcctgtccgagttccccgtcccgacgcccaaggccggcccgggccaggccctcgtcaagaccgcctttgtcgggatgacgcctctcgccgtctggatggtcggtcgctccctgctgacgctgtggcgagagagagagagagaatgagagcgctgaccctggcccgacgctgcagatggactttggctacaatgcgcccgaccagcagccgatgctcttctcaggcaccatcgccgggaccgtcattcaggtcggcgagggcgtcaaagtcgtcgtcggccagaaggtgcgagccctgcgtcttgcctttcgcaggtgcgaaccgactgaaccgtcactgctcccgcctcttacgcaggtcgtcgtcagcaacctcaagtttgacatcgcctacctcgcctcgcaggaggtcgtcctcgccgagggtgactgcatcatgccggtccgctctctctcacctctgcgtgcgcttggccgcaccgaacattaaacctccctcgtcgctcgcagctcgccgacgaccttacgctcgagcagggagcgacgatcggcagctcggctgtcgctgcgttccacgtcctccggaacgagctcgggctcgacatcccgctcgacccgtgggcgaccggcgaggcctacgtctccaaagacgccgaccagccgatccttctctggggcggctcgacctcaaccgccttctacgcgattcaggtcagtctccttgcttcgagcgtgcctgctgtccttcccgctgacgcatacaagcgtcgccgtctcgacagattctcaaggccgtcggcttcaagaacgtcatcacaacctcgtcgccgggctcgcacgcgcgcctgacgaccctcggcgcgactcacacgctcacctactcggaccccgagtcgacggccgaccgcgtcctctgcctcctggccgagacggcccacaagcacgtgccgttcgtcgtcgactgcgtcgccgacgtcgagacgctcggccccgtctcgaaggtctcgggcgaggggtcgaaggttgcggtcctcgtcccgctccgcaagggcggccacggcaagaccgagaagctcctcgaggaagccgacgtcgcaaaggtcgtcccctggcggaagggcgtcgagctcgtctgcgctaagacgttttcgtacgccgagcgcgtgcgtctccttgctgccgtcagtacttaatcgcaacaagctgacccctccacttgcgctgcaggacgtcggaatgggcgctaccctccagcccaaggtcctgcccaactggctcaagcggggcgcgctcacgccggcgccgtacaggattgtcgagggggcgaccctcctcgagcggatggcagaggccctctcgctcctccgcgagggcaaggtgagggccgagaagctgctcgtcgccctttgagggcgctcatcgctcgacgcccttcaacggcgccagcttccgtgaacaacaactttatccgacgacatcatgcccgagcaggggacgcttgtcgttccatgccgccttccctctcacgatcatctgatgacccttcctcgatgctgcgccagcgccgacagacaagataagctgggcacattcatacacctccccgcctcctacacgcgaggaggagcaagaagtttttcgtccatctccccggcatatcgctagccaagcgagcgcggacgcatccgcccaagaccgctcactgccggcccgggctctacgagcttagcgcacgtgcgcgtctaggcgccggcgtgagcccttccagtctctctgccagatgctgcgggcggcttagctggacgggttgatctcgccgaggatcaacgtcgagtccttcgagcccgtgagcactgaggagaggggtcaaaaaggtcagcgaggcgagcttgggcggagcgtgcgagcgaggggtgacgaacagataggctccttcgggtggaaggcggcggctgcaaaaggagtgtgaaagatcagcacgcggtgctcggaacgagggaagcgtcaagaggtgacgcactcgtgacggtacccttgtgccccggcaggcggtagagaatctcgccgctctcaacgtcccagaccgtcaccgcccggtcgccacctccaacggcgaccctccgtccgccatcgtcccgactccaatcacaccttccgagcgcgccctcaaagccggccggctggcccgcgagcacgcggtggatccgcgagggcgaggcggcgaaaggcttgacgtcatggacgatgagggtcgagtcaaacgcgtacgagaggaggtgctggcccgagggcgagagcgagagcgaggcaatcgtgtcggtgtggccgagcagcgagtagaggatcgtctgcttgcggatgtcccagacctagtgaagcggacgcgcggcgaggagcggctgtcagtcaagcttgcgccggccggctgcgaggttggccgaaaggtcgacttacgtggatctcgttgtcgatcccgccgacaaatgcctgcgccccgtcggcgctccatgcaacagccgtcaccggcaccgacccgtcgccaagctcgaccacagggtacttgctctcgagctcagcgtcccacacgcgcacgaccccgtcgtcgccgcccgagagcaggagctcgcgcccaccctgccggtggacggccagcgcattcacacagccgtcgtgcgcgagatactttcgctctcggacacccgtcgtcaggtcggtcaggccgatcgtcccgtccgacgaggccgtgtagaggagcgggtgaagcgacgagaactggaggtcgaggattggcgcttttgagcagttggtcaagagggccgtgttgttatgcggcgggtacgtccgccagagcgctgcaagcggaagagcaaggacgagcaaggtcagctcgcggaagcacgcagctcggctgccgagctctcgagcaacgcaacgcgcaaacggcgagtaggtcgccctggcacgcaagagccgggttcgtcctgtacgcacagacgttggagtcggatgagcaggcggcaatcatgttgccgtctggcgagaagcgagccgacagcacctcggcctgcatgaggtgggaaggcgggtgcgcgaggacctggtcagcgctcacccgacgcttggcagccagacgctgctccatagagacggcagacaagcaggacgcacgccgtgcgcgcccgtcagggcgacgatgggcgcctcgagcccgctcgtccgcttgatggtccggatgagcgcgccctggtcggccttgcccgagccagacgagccgatggcgaccgtcagcgtgttggccgagctgtcgtcctcgtcctcgatccgcgagcgtttcgtcagggcagatgaggcgcccggaccggacggagggggcgacttgcggatcatctggcggcggtgaaggggtatatgaggctggagagaggagcagctgaagggaagacgaggacgatgtgctcgcgtgcttgcgtaggttgcggtcggataggaaggcaaacgctgctgggcctggaggaagcgtagggagccggcctgtgtgcgagaccgttggatcgaagctggtctatgagggagggaggaagagcaggagcaggaggtacgatggacgagctcgcgagagtcggaccaggcgggcaggcaggagacgcgcgcgcggccgacggggcgagcagacgacaaagaatcaactatggctcgacttagatggccactcggcggcgcgacggccgcgcccagtgcgagctgggggatcgacctcatcaagccgcctctccatcctccatccttccttcctcttctcctttcccttcctctctctcctccgcctcgatgttcgctcagcgtgctgccgcccgcgcggccaagcccgtcgctgccgcccgctcgctcgcgaccgtctcgtcgctcggcaagcggacgacgctcgccaacgtccagtccgactcgtcgacgtcgtccctgacgctcgtcctcaaggcgggctcccgcttcgagcccgcccagggcgcggccgccgtcctcaagaactcggccttcaaggtgcgctgacgtcgcgttccgagaagcagccgagagtcgtagcggtttcccgatcggacgtactgaccagagacgccgctcgtcctgttctgccgcccgcctcattggccctcgccatgctcgtccatcgccgacgccgccatcgtcctcgctgcctgtcacgtcactgctccttaatactatccggatcgatagtcgaacgctgcttcgtcggcgcttgccatcgcccgcggcaccgagcagctcggtggcgccctttcggccacgctcacgcgcgagcacctcctcctaacggccgacttcctgccgggagacgagtgcgtccctagctcgccaatagtcttctgtcggctgcttcactagctgcctgacagctgcctcacaccggccgcgactcggagctgatctgtgctgcacgatcgaccgatcttgccagggagttcttccttaagacgctgcacgccgccctcttccccaagttccttccgcacgagcacaacgagcaggtcaagccgctcgtcgctcaggagacgcaggctgcgctccgctcgacggccgtctcggcgctcgaactctcgcaccgggtcgccttccgcaagggcctcggccactcgctctttgcctctgccgacgagcccgtcgctccctcggacgtccaggccttctatcgctcggccttctcgcaggagattggcctgattggccagggtgtcgacaccgcgacgctcgagggtcacgccagcgacctctttggcgacgagctcgacatccagctcgagaaccgccaggtgccgttcaacgccaagcaggccgccgacaagacgacctactacggcggcgaggagcgcgtcgcgatcgaccttcacctcctgcccgaggccaagccgacgctcgtcctctcgtacggcctgaccaaggccgcctcggccgagtcgctcgtcctcccgcacctgctcggcagctcgcccgccgtcaagtggtcggccggcggctcgagcccgctcggccaggccgctgccgcgaccgagggctcgacggcctcggccatcctctcgtcctactctgacgcccagctgctgtcgatcgaggtccaggctgagggctccaagcggctgagcgagaccggcaaggccgtcgtcgccgccatccacgagctctccggcggcaagctttcggacgagcaggtcaagggcgccgtcgcccgggcaaagttcgaggcggccgctaacgccgagtacacgtcgtcggtcgccctcgcggtcgccaatcagctcctgaccggcaagagcgcatcgctcgctgacacgttcaaggccctcgacgccgtcaccccggaatcgctcgccaaggtgcggctagcccaagctggtccttttagtcgcggtcgtgctgctgacatgccttaatctttgctcgttgcctacctgcaggctctcaaggagtttacctcggtcaagccgacagtcgtctcgatcgcccgcctcggccagatggcctacgctgttcgtctacatccttatagccatcgaagccttcttccgctaacaacccgttcttcgccccatcgcaggacgagctcggcctcaagatgtaaaaagcggggccatcgtcccaggattctttagatcagcacacggagagcgaggagggcgccgatctgcgcgagcgcgcggcggacagaagcagaggcgcgagcgagcgagcggtcagagcagcagggaccgcaactggaggacgtcgtattggtgcagaggcatgagcgatgaccttgccgactgcgaatgacgattgtgtgaagacgggacgaaagtgggctcgcctggcgtttacagggctgcaagcgggaaaggcggcggcccgcgcacgcggtgagacggcccgagcaagggcgccgggctcagcccaaccgcccgagtctgcgcgtcctcctccgcccggaacacccaaccccttcgtctccctcctttgctctagggcagcgacccgtcagaccctctcccaagctcctttctagaaaactcgactcgatggccagtccatcaacgacggtcccgaagccccgcggcctcggcttccgctacggcctctaccctttcgtagccgagaacgaggacgagatctcgttccagccgggcgagcggatcgagattctcgagcaggacgaccagtacggcgacggctggtggcaggtgcgtttcccttctcccccaaaagtcggcggtcccaggcctgtcgggcggtcgggagggcaggggaggcgggcgtgcgatgcgtgctcggagcagaaggaaccggcccgaccggcctggggtctcgactcggacgggtgcagagcagccaggccgccgtcgccggagggctttttacttgtggctcgcatgacgagcagcagagctgctccagcgagtgctcaaggtcggctttaagcaagttggctgacgctgcaacgcaacctcttgcagggccggaacgaggccggtcgggagggtctcttccccgcactcgactacacctcggccgacccacctccttcggtcgcttcgacggcgccgagcgtcacgtccgtcgaggatatggcggacgaccggcgaacgtcgcaagactcgccactctcgcgcggtccgaatggcatcgcgggcggcgtcgctgctgctcctgccgccgcctctacctcgccggcggcacccatcgtcgcggaccggcctccgtcgccgcgagcctcgacgccgaccaaaggcttcgcctcgcccgcagcaaacgaggcggccctgcccaagagccagccctcgcctcagatgaacgcgacgttgaccgacgtccaggcggcgatcgaccagctcggcggccgagacctcggcggagcagcgagcgccgtctcgatcccgctctatgcggacgaggcctcggtccggtccttcgcgacagactcgcacaacggcggcgctgagagcatcaacggcggcgacggcgacgagcacgagcaggtcggctggagcgccaagacgcgccgccgtctggcggagaaggcgcaggccgagaacgagcgcaagctcgcgcgtgaggccgaggaggccgcgcttggtcgggcgcgggacgagagtgcccagaaggactggaaggcttctaggagcgaggagcccgaggagaaggcgcctgagggcctcgagttctcagacgagtcggacgaggaaggggaagggttgggcacggccgcagcgacgccgagactcaacggcgagggccgtcggagcccggagcctcaaacaaacccggcctcgttcaagaccgccacgtcttctcctgtgctggctccccccatcgctgtcggcgagcagctgcacgaggaggcaccggctgtaacggaggagactccctccgcttccgccgccattattctggcggcctctgcggtcggtgtggtcgctgagcccgtcacgatcagcagctcgcagatcccagagtcggcactcccgacggcggccgagcgggccgagcaggcctttcacacggcctcgaccgcgccgtccgcagtgtcgcaggagccttcgccgttccagtcgatcgtcccggaccagttcgagtcgcctgccgtcaccgacgccaagactgacgtcgaggctgcctctcctgccgccgtcgcaggcggcgcgacgcctaagactcggccggcatcgcttgtcactcgtcaatcgagctcggccgacctgaacaagggcagcgcctcacctgctctgcctcggtcaacgccgcttgccggcagcagcccggcggcgaccccgcgctcggccgaggactctctccctgagctgcctcgcgagcgcgtgccgtctgtgccggccacggcgtcggggccgatgtcacctgtcgagcggagctcggtcggctctacgccgggtggttacatgtcgcccggcggcttacggcggccgagcttgtcgaccggcggtgccggcatgggtacggctggcgtcgctggcgagccgatcgagtggggtgtcgccgacgttgttgagtgggctaagcgccgcggtttcgacgagtcggtctggggcaagttcgagggtgagttggcgcgtcaatccgcttctccacggcgagcatcctgctgatcagctgtctgcctcttcgcgtcgcgctcgcagagcacgagatcaccggcgacgtcctgcttgagatggacatcaacctcctgaaggagattgagatcacggcctttggcaagcgcatgaagctcgctgccgccatctccgagctccgacctgccgccgacacgcgcgccgcctcgatccgctcgggctacagcccaacgcaggcgaccttcagcccgcacagcaacttctccggccagggcggtttcgctagcgtcgggccgtcgcctggcttcgtctttggccagcagagccggacgccgtcgatggttgatcctatctcacagccgacgtcggcgtcgcagtacgcctccaactggagccaggagcagggcccgccgccggccactggcgcctcgtcggctcccccgatcgtcggtcttggctttaccccggacgacaaggtcggtcgaagcgggccctcgggctcagcctcgtcagctgctcttttgctgactcccttccgtgtgcttgcagtcgcgccaggcatcggtgtccgcccctgtgagcccgatgaaccctaccagtgacgctccgacagcggcggccgctcccatccgggcgcagcacactcgaacggccagcggtgtcgagtcgcttcagggcaccaagatcgaggaggagcccgttgtgaaggaggctcccgtgcgtagcaaaacatcaacattgacgctcacaccccactgacacaggccttcgcacttcctgcagtctgtcaacttgtcctcgccgactgttggcccgagcgcgttgtcgcccatccctcgaagcccggccacattatctcgcgccgacgttgcatcgctcgactcgcgtacgctcgactcgcacaccgttgactcgggcagcctgccgccgagccctggctctggtgcaactttcccggccaaaaaaggcacgatcagccacaagaagtcgaaggccagcgtcgatgagaagagctcgttcatgggcggttttatgtccggatccaagaacggccgcaagccggctcctcgggcagcaaggtgcgctgtcgccctcctgcgcacggtcgcaagcgactcggctgactgatcatcggcacctcttcctgcagcggcgcaagtgtcgcctcgcccgacccggcgtccaagtctccccgcatgggatcgacctcgtccaacttccgcaggccgcccaagggttccgacacggccagcacgctcaagaagcgcatgtcggttgtcgagcccgagaactcgcctcgcttcccgcaaggcgagagcaacccggacgccgtccgcgcgctcgaccggatccccaagcctgaatacgccggcttccttcgcaagaagggcgagcgctacaactcgtggaagctccgctactgcgtcctcgccggcccacacttctactacctcaagtcggaaaatgttcgtgccggtcgccgcttgcatacatttggcgcgttgctgacacttcatctcgcgtccggcctccctcaggacgccaagttcaagggctacatcaacctgactggctacaagatcatcgccgacgagaatgccaacccaggctcgtacggcttccgcatcatccacgacaaggagccgacgcacttctttagcatgcaagaccagtttcaaatccgcgagtggatgaaggcgctgatgaaggcaacgatcacgcgcgactacagcggtacgtcagacgcgcatcttgatctgggccgtcttccgcgactgacgtcgtttctttcgcacgcactagcccccgtcgtctcatccgctgtcgtcccgacaatgtccctcaaggaggcccaggcgatgagcccagccccgcggccgccctcgccctcggagcgtcttgcgacgcaactcgcgagccggcgtgagaaccccaaccagctgacggcgcgcgatgcgtccatcctggtacgtctcgcgctccctcgcttgcgtctcgtgctccctcgcttgcgaacgagagccgccactgactgtcctcgctcgccgcagatgggtgtccagaacggtggcgccggtgctaagccgagcgttctggacgcgcgtggtctgccggccgtagtcccgccccggccgtcgcgcgacatcagccgaagtagcttcagtcaagctgcagcaggcccgaacgaccagactcgccgggcgagcaacgctccgtccgttggcggtggcgaatctgctagccctctgagcggcggacgcccgctctctgcaagcaacggccgacctgtcaacaacggccggcccgtcagtggcgggcctgccgctctctcgccgcagatgcagttcatcaacgccaacctgccgctcggcgacttccccccggtcacctccaaccccgagtcgttccgctcgggcctcgccctgtacgtgctcttggcttgcgtgcgggcagatggtcgcgtaacagcgctgacgccccgctcttgcactttacacccattctcaggatccgcgccgtcgagcacatcaccggcgtgtcttcaggcatcccgatcaaggactttgtcgtcaagacgaagcaggagcacgaggacatcatcatccgcgtcttcgacttcttgattgactctggcgtcaatgtcgacggcctgcatggtacgcctcgtcgccttggctcgagacgccaatcagctgctgacgctctgcccgcccatcctcttcagtcgacgatgttgttcaaggcaacgctgccggcatcgaccgcattgtcgaccgcatccgcgagatgaagagtcgccgttgaacgcgcccaacccttgttccatctatcatatctctcatctacctcggccctcctacctagtaatcgcatgtcagctttcgcacctcctcggtctggcactggtcgctctcataggtagcactcctcgcctgcgtctggttgaccgctcagaaagagggatggcctctggcttcccagcgctacgtcaaccggcggtccgcaaccaacgcgaccccacgtagccaagagcgaaggctcaagcactcgcaagaagtcccggttaagcacggcatctagggcatcgtacagggttcgtcgaccctgggtcgttttatagagaggagaggaagagagataagggggtatcgtgagggagcgctcgtcgaccgcgaccgacggcgctcagaagtgcgagcaatgaagccgtctatgacatcttgtacttcatcgagccggcctggacctcgatggcgccgtcggcgccgtctgtcgagtagtcgatgatgatgtcgaggtcgcgcgggttgacgccgttgggcttgcagtcgaccttgcccttgatgacctggccctccgagaccatgagcgtgtcgggcgtgtagaactggagcgcaggagggtaaggagatgtgtcagctcgagagatccagaccaacgactgaaggtgcagaacgagaaacgcacgacggtttgcttccagtgggtgtagcgggcgtgcgggccggtcgagaacttgatcggcttgaagcagcacgagaagtcaatgtcgaaccaggcgaggaaagcgtggacgtagtcgttgcgggtggcagtgatggcaaagtcggcggtaaaggcgaggtcctccttcttgacggtccggatgtcaatgtgcttgatctggcagggctcggtgacgaccgacttgaggtcgactgtgtcgacgaggggctcgcggagggcaatctccttgatgcacgagtagtcgaagccgtagacgtcgtcccaaaagttgatcttctcctccttgtactcctggtcctcgatggcggcgatgtgcatcgtcgcaatgtcggggaagatgaggccgccctcgacctaagagaggagcgcgcgcagcagcgcagctgtcagcagctcgtcctgcgatagacttgcagaacagcaagcctgagacgtacgaggtacttgtcacgggcaacaaggacggtgtcgagcatgctctcgtacaggaggaagtagcccatccactggatgggcggaagcagacgaggcggcagggagaagacgcgggtcagcttctgcgcgcgaatgaacttcgtccatccatgttaatctaagcaagcgaaagggcgcacctcagagatgatgatgtcgaccgacttctccgggagctcaatctcctccatcttgcccttgatgatggtaatcttgtccttgaagccgttggcctcgacaatcttggtcgcctggtcggcaatgttcgacatgtcgataccgtagacgtgcttggcgccggcctttgacgcgaacatcgagaggatgccggtaccgcagccgacctaagaggttgagagaagaacagaagatttagcacggcggagcgcgagaacgaggtcgcggccagggtgccgtctgtttgcagctttggctgaggacgcacgtcgaggacgaccttgtccttgaagaggtgcttgttctcgagaatggcgttcttgtacgagttggtgcggacctggtccttgagcatctcctcgtgaatgcctggaggagatcgaggcgaaagggaggaggcgctgcggggtcagcgacggcaaacgacagcgcttgagataaggcgcagacgagagagcgacgcaccgaagtgagcgtacgagtccgcgtagctggaggatcaacgagaagaggaagccagagagggtcaggttgcggtcatatactctgtggcgactacatccaacgcctctgaccgggctgagcctgggtcgaggcagcctcggagggagcggagtgaggcgcaggactaactagtcgcggctggtgaggttctcgggcttggcagcgccggcagcagatgtagaggcctccatggtgaagatgaggtgagggtagggagaggagggaaggtggtttggagggcaagttcgaagtcgggagagctgcgagtcgtcgagaattgctgcgctgtcgctccggtctctctctccgcgtgcccgccgggcgaaatccaaaatctgttgtaacgagcacacggccgctcggcgtaacttgtgccctttgagcctgcccaccaaaacctctcctcctgcaccttgcagagtcgttctccagtcactcacgagagtctgtcgaaccctctgccaggtcgacccgaggactcaacgaaagctcgatcaaagccaagggttgcccgagggacgactcccgcacgcattcaccaagcgccgcaaggtccgagaaaagcgtgtctatgatagcagcagtgtcctccccagccctccttttccctcctcagctgtcgccgatcgacttgtagagcttgccgttgttgcgccgcttgccctggttgcggctccgctggcgggcccagttgcgagccttttgatagacgacgacgagcgccttctcggcccacttctcgctagcaaagcagaggacaacatttaggccgacgatgccgagcagttgaacccggaaggccatggtgaggtccatcaggtcgaggaagagcttgataggcccggccgggatcagcaagacgtaggccgagaaggccgtcaggagcgtcaggcagatcatgagcgagtctgtacgaggaaggaggcaggaattggtcagcgctgcaggagtcaagcaaagggcgtcgtgtagctcacagttggtgtagatcggccggcggtagggcggcccaccgctaaagacggcggcgacgaggatgtattggaacgacgagacgaggaacagcgccgagttggcgtagttgagcgtctcgagcttgtcgacgtcgacctcgggctcctcgtaccacggctggctcttgacgagcacaaagacgctgatctggacggcggcattgatgacggtctggctgatgatgctcgtcaggacgcgcttgctaacgagcgagcccgtcggccgcttcgggtgcaggtctgggtagggcagcgtgcggcccactgcaggtgatcgcaatcaaggcgggctgtcagcaggtgtagcaagagcggtgcgagctgtgtatgagaacacttactggcgacagcgatggggatgatgatgaagaggtcaatgtagaggaactggaagtcgccgagcgacgaggcaaacgagtagaggagcgtgattgtcgtaaatctgcagccggcacagagaggtcagatacgatcgcaacacgcgagagcggaagccagctgccacgcactggatgagcgagtacagggccatgtacttgaagcacgagaagctggtgacgagcgccgcccgtccctccttgatgacctcaatgacacacgagatgtcgggcacgcggctcgtgaagggtgccgcgacggacgctgaggcaggcaggacgaggacgaggtcagctccggatgaccttcagcgtcagacagctgcagagcgactgaccctcagcctccgagagagaaatgccgacatcggcggccttcaaggcaccgcaatcgttggcgccgtcgccgcagaagcagacggtgtagccgagttcctgcaggcgctcgacgagctcgtgcttctcgtcgggcgacatgcgcgcgaaaatgactcccttgatgagcatctgattcgaatggaaaggcgtcgagtcagcggacaggtaagcagagcgaagatcggaaagagactaagggacgcacgcggtggaacgtctcgagcggagcccagtcaaccatccagcggaagacgtcaccagtgacggccaagctgtactcgagcggctcctcctggtcgtcgacgaggtgcgtctgctgccgtgtgtcgagcgggcggagcgagtactcgtcgagcgcgatgtcgtcgtcgtcgaccgacgtccaggcgatgtgcgactcgggctccgaaggcgagccggacgtaaaggatgggaggaaaacggttgcagactgggtgacgaggccgcactcgcgggcgacgctgacggccgtgcggacattgtcacctgtgaccatccggcacgtcaagtgggcgccgcgcaggacgctgatggccggcgccgtgccaggcttgagcttgttctcaaagacaatcaggccgaggaagttgaggcccgactcggcttgctctctgccgtcggacagtcggtcagcgacggacgtgcggatgagtagccgcagaagacttacctcttcatccgctgcgccttgagccaggtcaggccggggaccgacttgccagcgatggcaatgacacggaagccgtgcttggtgtagtaagacagcaggtcctcgtagtccttggggactgcgggcgacggaggcacgaatgctaatgatcagctactgatctctgcaatggagactgcggcagacgtacaggacgccgggtcgcagatctcggccatgacctcgggcgcgcctttgacgtagatctccatgctcggtgccttcagccgcttgacgatgacgctcatccgacgcaggctcgagacaaactcgaacgtgcggatgacgccgagctcgaggaagtgcgcgtgctgcaggagaatcgtaagtcagctttaagcacgccaatgatgggaagtactggacggcaactcaccctcgtgcccgacgacttgagtgcgtcctcgacctcaaaggcctcgctcgacttgggccggacaacagtctggacgagcgtctgcggccgctcgaccgtcttgccgttgccgttggccttggccttgtcctgaccggcaggggcggccggtctgcccgcgcggccctcctcgagaacccagccggtaaagtcaaacatctcgacgtcgagcgggtcgccgatgacctcatcgttgaccttcttgaggccgtggcaggtcgcgagcgcgtagaggagcggcgtcttgccatcaggtccaccggtcggcgggacctctgcaatgtccgagtgaagctcagagaagcggcccgtgttcttgtcgatcgagcggatgccgaggacctcgaggccctcctcggtcagcgtgcccgtcttgtcgaagcagacgacgttgatcttgccgccaatgttgacccggttcggcgagatgcagaagatgccgagcttgcgcaggcggtcgatcgcaaaggtcgtgccgatcgagagcgtcgccgggagagcaggcgggacgacgacggtgatgaggtcgagcgcgcggacgaggatcgtgtgccacttgatgccaatctcaatgaacttgccgacagaaattaaaaagccgaagccggcgatcaggccaaggacgccgatgaagcgcatcgagtcgcggtagaacttgaagcccatcggcttcgggaagagcatcgaccggacgagggcgcccttggttgtgttgaagccggtccggacgaccatcgcaagcgcccgaccctgaccgcccggcgagttcgtcccagccgagccaggccggacgcggatgatcttggtgccggagaagaggaagttctgcgcgagcgagggcgagacgtcggtgctaccattcttctgctcggccgcgagctcgcccaagccgtcgtccttgattggcatcttggagacggggactgactcgccggtgagcatcgactcattgacgatggcgtcgcccgagaggaggacggcatcgcaggggacgagcgtaagcgaggcgtcggacgcgtcaaagacatcgccggggatcagcgacgacgagtcaacgacttgccctatgaaaaggacaggtgcggtcagtttgcgggcggggtgaagggtcgcaggcctggaggacagccttacattcgccgttgacgagcgtctggacgtcgcatgagaagcgcgacatctcgcgcatgcgttcaatcgtctgtcatcagcggtaagcaggcgagtgtcagtccagagattcagaaggcaactgccggtgcgacgcacgcgcttggtctcgatcagggtctgggtgatgctcgacacgctgatgagcgcaatcgcgaaggcgtagtagtagtagctgcgagaaggtgaacgacagcaggtcgacagcgtcaagtctcaaattggggagcaagaacgtcaggatacgtactcgtcgagcgtccacagcagaatcgaagcgacctggaacacgtagaacgggtggaggacctcatcgagcaggagcgagatgacgctcttgccctcaatgtcgatcgtgttgaggccgaagaggatccgccgctggtcgcgcgttgagtcgtcgagcccggcctggaccgtccggagggcagaccagtggcggtcacgccagtcactgtgcgcaagaagggtagagggtaagaagagtcagtcgtgaccttcgctgaatccgcgtaagcgcgcgcacgcaccggaccaaccgccactgagccttgcccggcacgcgttcgtcgagcacgaaccgcgtgtagcggtagtcgacaactttcaagaagcccatcgtgtcctcccagccgacagaacccgcctcgacatcggtcctgtcgagcgcgacaaccatgtccttggcgtcggtcgcgacggccgcggcggcggtggcggtgccgttggtcgaagcggccgagctggcgttctgggagcggccgacagggcttgcggcagagggaaagacggtcgacagcgggtacgggtaggcaatgctctgcagcggaatgatgttgaggtccttaaacggtgtctgcggagaaggaaagcaatgcaactgtcagcttgcgtgcatcggctcgagtcaaagggtgactcgacgcacctcgacgaggatccaacgccggcggttcgtctcggctgcaaagtcggtctccttgccgacccagcgaacccaaagtctcggcacccagcggccgacgaggccgagcacgccggcggtaaggacgacgccgagccaccagacgagctcacgccagcggaccgtctcgaatgcgacaaagagtagggcgaggtcctcgtccgggagcgagatgatctgccgcgagccggcctggtcggacatgatcggtgcgaaggccgcagcaggaccctcagcagcggcgccgccacggccgggtgctgacggctcgaggtacgcgttgccgttgccagtgttgaagacgggatcctgcgggagcaaggggatcgttggctcaggcgagtcgggatgccggctcgaccggtggtggaggggcatcagatcgttgttctcggaccggatcgaggcccttgacgagcccgaatcgctctcgttcgacgagtagccccagttgtcgtctgacccttcgtcgtcggaccgaagcgagccgtccgagagggcttcggactgaattgaccgccgcgagcgcgaggacgagcggtgcatgagcgacggccgcgagcgctgggacgagaacgaccggccgtaggcgcctccgccggccgggtcgtcctcctcgtcggcgacgcggttgccgccaaagccaaaggcggcagcgatcccgccaaggacgccgccccgccgcttgccggcgtcgtcagcgtcgtcctcgtcgtcgctcgcgccgtctgccttccgcggccggcgctggaagaggagaccctcaccctcggcctcggccgggccgtcgacgagcgcgtcgtccgagagcgcgacgctcgcaccggccgttgtccggcggctctcggtgctctgcctgcgcgagctcatcgaccggcgtgagattgactgccggcgactctcaagcgtcatcgaccgccgaccggcgtagccctcgaggtggtggtgcatcgacgtgaccgacgaaggaatgttgtagctcccagggccgtcaaagatggacgtctggtgaccagcgtcctcgccggcccagccgctcatgctgtcacgccggccggtccggctctgctgaccacggattgcgagcgcctcggcaatctcgctcgcgtcggcgccctcagtccagtcggtcgtgctgaagtcggagggcgacgaggtcccggacgggccgtaagggtcggtgtcatgggcgttgggctcgggctgcgagcccgacgaggccgaggacgagtgcggcatgttgcgcaagagtgcgctggctcttccttaaggcgagagtgaccgggcgaggtaaatgaactggcgggaagagaggaagggcgtcgctcgcgcggtcgtcccttctgcccgcccggtgcgaaatcgcctctagcaacttgcaggcgcgtcatgcggggcggcggcggctgggctgaggtcgggccctccgaagacacgggcgtgtcgcccctcgaaccacattctcctcgaccctttccctttcctctcagactacccaccttcatcatggatctgtgcgtacttcctcctcatcggagctcgcgtcctgcagtctagaccgcccgtcgccggcatcgcgcgagcatgaccgccgccctgccgccggccatcacatcgcgcgcgccctctcttgcacgagcttgtctcgcccggatagggggctgacccctgtctgccgctcccttgcagcttcaaccaggccaagcagtacgcccctcaggccgagaagttcctccagagcgagcagggccagaaggtcggtccctttgcgagcgcgtctggtctcggagggccgagctcgaacgctccccatctcgtcttggttggacgatccgctctgtctgctggccagagctgacctgaccgctgtcacatgcgtcccgcccactcagatggaggatcagtttgagaaggtttgtctctcccacgtgcttctcctgccactctggccgagcgtgcaggctgaacctcgttgctcctcctgtcgccagtcgaccggcatcgacatcgagaagtacctccccggccagcaacagcagcagcagcagcagcagcagcagggcggtgcgcctccggctagcgacgtccgcacgtcgtcgagcagcagcggtcagtccctcattccatcatgccctcttccaactacctcaagcccctgtccggccccattctcgaccctcttgggtctgccactcatccgagcaacccgagctgaactcctgttacctcctctctcgccaatttaaacagagaaccagaacgccgacggcaactaccaggagtactcgcacgacagtacgtccctctccttccccttccccctcggcgttctggttctctgtttaaattggcgagctccccacctcctccctctccctctcacccccatcccccgccagccagccagcaacaccaccgccgacaacgccagcagccgaccgcctcctcggccccttcgtccactccgaacgcgcaagcgcaacactcgtcctccagctgctcgacgcgctcgtcctccggctctttccggagctcgagctccgggcttagtgaggggatgatgatgtgatatttgacgctggcgcttgaagggaacggcggtgggaaggggtggtagagcggggaagggggtcatgaatgggaaggcaaggtgcgctgcggtgcgagaacggggtttgtgcgaaaggggagcgacggaggagacgaggagacacgggcaggcgacgggaaagccgacgctagcataatggaggacaatgagagcacctcgatcaagctaaagatggaaaagtgggactgcgacgagtgcaatgcgcgaagcgcccgactcacgcccgctgagcctcagcccggccgcccggcgggctctcgaccctaaccttcgcgccgacggccggtccccagttgctcgccgcgctgtttccagccccaacccctccgccagcgccgccgacaagaccgagcgggacgccgccgctcatcggccctccagcatgcgcgccaagcccagcgccaacagcactcgcgctcgcgtggccgaacgagcccatccggccgtgtcgtgcatagttggggcctccagggacggcgcttggcggctgattgaacgagcccgagcggcggtgggcgtgtcctgcgttttgaggaaggccgggcggcggcggcgctggctgctgctgctgcgacggcgggttgaactgggccgcgtaggggttgccagggttgccgaggggggacgagaaggacctgcgagtagggaacgacatcgttagcgcttgatgcacgagcaccgaaggctcatggttcaaagagcagacgcacccgttaccgctcgtcgacgcccccctgccatgcccgccgacgcccgccgcccggccgatgctccctgcccctccaccgccgccgccacgcgcattgacggcagcaatgatgttctgcgcgtcgggcccgtcgtacggcttgatcgagacggcggcgccgagcgtcgcgtgcggtcggaggagggtcgagaggtaggccttcttggctgcgggcggccggagcgagtcgatcgaggatcgcgtcagaacgcgttcccttgagtcgcgaaagcgcgaccgatggagctgacaagatcaggtagggactgaccgaccgcaggactctcaaagacgatcaggaggttcgtgtcgtcgagccacttgaccttgtagccagcgaccggcggccctcccggctgctgctgcggcagctcggccaccggcgggtcaaactctgcgaaagccgcgaggatgtcgcgcgtcttgagctccttggggaaattggagagggcgagaatgcgcgtgacgcttgcggagctggagggaggggggagttgggccgagatggtgaccaggggcgaggaggggataatgcgcagatgattggcgcgtgcgtggccggggtgaaggaggcccgccgatgggaaagcgacaacacgtcagggtggagcgccagccgcgaccgtaagcgagtcattggagtcaagaaaaggcggtgggttagccgtggttgagaggcaaggtcatggggagcgaggcgatggacgcgagtgaccgtgcgcgcgtgtcggccgcagcgcgagcgagcaagggaggtgaaagggggaaaacgagttacgagtcgtcagtcggtggacacttgcagatggccaccggcatcctgcaggtacgcacaggctggaggagctcatcactggcgagccggtcgcgaatgtagaggaggagggcgggcgtgaagaagagggccttgtcacaggcgcggtctcagtgaggggcgtgatgaggtaggctgcgagcggcggtacgagacgatgcgggcgacgacgacaacgtttgaggggagcgaacgagagcctgggacctgccgagagcaaacgggtcgagcgaagactgaagtagggcttgggaacggagtgggggtatgaggccggtcggcagggaagcagggataggtcgaggtgagtcggcgaaggcgcagcggcccagcagcacccagagcgaggtacgagtggccggacctcgttcgctcgcaaccacgacttcctcctgtcaagctagacgctcgctccttgcggtagatcctacgtcccactcggccatgtgcctgttcctcttgcagcgctgagtatcctctgtcctcctcagcccccaatgtcgagccctccgcctgctcctcctccaccggcatcgccagcagcctcgcagcactcgccgctgcttagctcgctcctctggctgctcgacgagactaacatcatcgtcacctcgacttcggccctctggtttctccgccggccgagcgcgctcaaggtctggttcctcggcggcgccgtctctgcctcgcttgtcggtgcgtcacgccgctacgtcgcattcgctgctctcgcccgcgcagactgataggcctcgataatcccagccaaggtgctcaagcatctgatccaggacgcccgaccggcgacgcacaagccctcgtcctcgacgtccaagctcctccagcgcaaggtgccgctcgtcgcccggacgccgacgtacggcatgccctcgacacattcgacgacgatcgccttctacgggacttcgctcctcctctacgtccttcccctcaacccaatcgcagctctctcgggcacagccttctgcgcggccgtctgctggagtcgcgtccggctgggccaccacagctggccccaggtcggcgcgggcgtcgcgctcgggtcggtcctcgggctcgggcagtgggcggcgtggagggggttcggaggctgggagggcgtcgggccgagcgctgaaggcggttgggcactcgtcgagaacgtcgtcggccgggtgcgcgcgcaaatgtagattcgatcagcctcttctcggacgacgagcgcgggacgacagaggcgtgacaggcagggtcattggtgcagggcttgacaagggcagggccgcatgtgacctctcgccagcggttatacagaggggagcaaggagacgaagacaagacgggacgactgcaggcgggaaggcggacgagcgaaggacggagctgaggctaaataggagagaccccggacacgggaggaggaagaaggaagacgccggcttgtggctgacgagatggaggccacaaccggaggacgcccgcgcgctcagaaacggccgccgtcgagcgcacgaaggccgacggcctggccggtgccaggagggccgacgacaggtgccgtccgtgatctcgctggcttcctgaacgcccgcccttcagagccggcaatcgcatccggtggtcgcacggtcgtctgccgctctcggctgggtgggcggtcgaccggagacacgatagtcgcgtgcgtcttgctgggcgcgtggcatccgagtgagaggccaccttcctcggtcggggtggagacatcgtccaggccgccgccaggttcgtcaagcgcgagtgcgagcgtctggccggtcggcgtcgtcaggagcgaggtcgtaaacgacgctgcggtcgtcatggccagcgacggcgcgaacgaagccgtcgacgacttggccgacagcgcaccgaaggaggtggccgaggtgcgctcgccaagttgcggcagcgggggttgcgactggtctggctggttgtggtggtcgttctgccgggccgtccgagtacgcgtgcggcgcctgccagcggctccgccaggagtgaccgcccgctcgcgcaagacggcgtcgaagtcccagccggcgagccgctcgcccgtctcgaaccaccacgtcgccttgcgctcagccgaccagccctcccccctctgctcagcctcgaaacgatcgcgcgcctcgcgtaccgttccctccttccctccgggcgggaggtagaacagccgatggtccggccggccagcggcgagcgcctcggctggcgggtggggcgagagcgtccgtgcgacccagagagcgtgcgcgagcgagagctctgcttgcgagaggccgccggcgggccgagggtagaggacggaagggacgtcatcgaagccttcatcggcgtagatgtacgtcggctttggcgaagcacgctgtgccaagagcgaggcggtgggtgtcgcctgctgcctcggcttctctccagcgccggaccggccaaggttgagaaatcgccgggcagcactcggggccgtaggagcgttagccgactctggcgctgcatctgcggcgatcggcaatggcttcgaggagcggcctgtagacgagcccgggccggcagccgatgtcgagcgacaccgagtgagccctcggtgggccttgcctccgcttccgctgacgatggccgagcggggctggaaacgagggagccggccaagactacgagcagcgagggcggcagacggtcagtcgtgtgcagtggtgaagggcggccggaccaacgacgaacctcggttccgaacgcccgccttcctcatcctcctctgccagacgctcgaccccctcaccctctcgtgtccagcctttctccttgtccttcccaccaccccagcgcaggaagccaacgaggtcacgcatgctccctcccgacggcttgacctctgcagccgttcctcgagagcctgctttggccggtcccgaagcatcaggagcgtcggtggtgagccgatgtgaggctgaaccgcggcgcgactgggaaccggcggcgagtcctgagcttcggcggcggtcggcagcgttcaacccggcagaagaggcagcggccggaggtgtaccgcttgatgacggcatggctgcgggccgagcgctgcggtcggcgctcgccacccaggacgacgacgatggctgggacgtttgccagcctgggccacccgacgtcgcgccaaaagagccggtcgagtaggagcttgtgagcgctggtctgccgctgcttgccggctggaaggcgtacgtcgggctgaggagcggcgagcttgccgcgggtatctgggcggacgagctgccagatgctgagcgcggcgtgccggagtgaggaggtccaccacggccgacgtcggtggacgaggaggccgctggcgaggctgggaggtggccgccatccgacgtcggtgaaagcacggtcggcagctgagaactcgctcccttggttcggccagacgagaacgaccgctttgaccagcctgagccggtcgtcgccgtcgtcggactctgctggctaggactgcgctcgccgtcgcccgctgccatcgcggctgccgacgatgaagggtgcttgccggcgctcccactgctgctgctgctgctgccgagcgagccgaagccaaggctgagcccgccgatcgaaagcgatgtcctacggttgtggtgcttgcgctgagcaagcgagcctgtcgcagaggatgattcggacggctgctgctgctgctgcggaagcggcggcggcgaggacgatgacgagagcggtgacccaagcgggtggtcgccttgcatgcggtagtcggccagactggcgagcgtcgacggtggaagggtagccatcgacgacttgcgcgaagaggtcggcgattggcctggtgagacggatggcgaggccggtctacagacgagatggagggcgacggtcagcggcggcggcagcggtcgagcgctcgggtaggagggacgaacaggccgagaagggccgtcagctttccctcgcggttatcaccggccgcatttggccgaaggacatcctctgtcgcagctgacgacgacgacgtccgtatcggccgctggaggaggagcaggtcgcccgtgctgctgccggcggtcgagctctcgggtgaccagtcgagcaaggcgtcagcgagcgcaccggctgacggccgcctacctgtcctcgcccatggctcgttccgcctgctgctactgccactcggtcgagctgtcagtagcgacccgctgtcgagtgtcgtcgtcgggtcgaggccgacgagtcggagggccttcgtcgggtcgacgccggtgccgtgcgggaggaggttgagtccgagctggggcggctcggccgacacgcgcggcggggccatctggctggctcagagatgtccgtccctgctgcagtgactctttgcccgggcggtcgtcgagcagcgactggctgatctgatgggttgaagctgaggaagaggaggaggaggcggcgctgaccagcaggctggcttgcaggctgagccggaggcgctgcaagctcgatcgcctcgctgccggcctaaagtgcccacgtctctgtgcgcgcgcggcgcgcgcgtcttccttcccttcgtcttcttctgcccaccgaccgtctcaccctcctcacctagcctcaccctcgctctcctccctctacgcgcgtcctcctcgatggagacgcctttcaaccggccaccggtccgcgctgagccaccgccgcttctgcccttcccgcccgacaccgccggccggccgacgacggacgaaggcgtcctcggcacgcgtcgggtcccagccccttcgcccggccggccgggcctccttcgcaacaacagcatggacttcctgggcgaggcgcccgacctctcgcaaggccggcgcaaggtactcaagtgcgtatcgacatagggccgggagggtgggagacggcggatgccgtcgagacgcgtcctcgaaggagggccaggcgcgtctcgtaccgcccggatgaggaagccggctcggcatcgaaacgaagggacgaggacaaagcctgaccgtctttcgcgtcctttactcctcgtcgctcctgcccctcctatcttgcagtctgtcggccaagctccagcagacgtcgcgcgcgccatcgcacccgacctcgaccggctcaagctcgagcgccggtcgctcgctgtcttacgtcccggcccactcgtcgtccttcgactctttcctcgatggccccccacctccgccagcgccagcgccattcgcacaaacatcgacccgcgccgctccgtcgtcgtcgagcgcattcggcgctgccctcggaatggagattaaggtctcgccggcttcacctggcaagccgccgccgggtgcgagggcgagcgcaggcgcccgggcggccgcacttctcgccagccagccgtcgggcgtcccggccgctttgagctcgggctcagacaacggcgctggagccggaggactcgaggctggtgtcgagctgagcgtctcggcaaagccgaaccgcaagggcaagagtgcgtgctctttgcgccgatccggccatccggggcgtcgcttgcgagaagagagagactgactgacctgcccttcccgaccgatctagcccgctcgcgcgctcctccacctccggctccggtcctgccgccgtccgcgcttggaaggcagtgcacgacggcgacctcgtccccgacctcctccaccactcggctctcgacgacgtctcttgtcggacctcctctcctcccctttacgatcggcccctcgcctgccactgccgactcggccgaggccggcggcggcgtcggcgcggcggcggcgacgggcgaacggaggtctgtccgtccgagcacgatgatgcgcaggtcgtcctcggccagggacgtcaacccactcgtccgagccgcagcatccaagtcggtcgcctcgctcaatctcgccagatcctcatcgatcggtggcagcaatgacaacggcggcggcggcgagggaagccatgccgggggagcggccgcggaggaccggcctgccgcgctcggctctgccccgccgacgcccccgcccgagcacggccacgatgccgacgagctcgccccgtccggcccgtcatcttcgtccccgtcgacgacgacacgcgtcctcgcccacacgcgcatcatcaaatcgaagccccggctgacgcgctcggcctctgcttttggcgggctcgatgcggccggcggctcggcctacgccctttcggctcccgtctcgcccaagagtcggggcgcggccgacttctggcttcaaggtggtgagggcggcggcggcggcgatgaggttgacccgctcgatgatggcgagcagggcggcgcgtcgtccagactcgtcctcggcccggcgatcgatgctggcatcgaggtgcgcgcggccgagggcgacggacccaaggttgccgtcccttgcccgaagcggacgaaacgctccccttcgcccgccgcgatgggcagtcgatccgaagttgacgagcgaggcccaacccagttgccatcgccgccgcacccatcgcctccgctcttgcacgcccaaccccaaggtcaccaccggcagcagcagcaatgcgacgccggcgctccatcccgtccccggcccgagcggctctcgttcggcccaggcctctcggtcgtcccctccgccggcggaggtggccttgcgagcccattcgaagaggtcgccagcggtgggccgagcgcaaactcgtcccctccaaggccggacggagagaacgcccacgtccagcagcatgccgctgacgccgacgacgacgccatcatgagcgagccgtcgggtccgtgagaaggcgaatgcgccgcgctcacggctcggccgcccttcagccccggtctctgcttgacagctctccatcatatttcttgtcctccccccatactctgccgactctctccgacctacggcgtcgacacacgcactccgccatcgcctgcctcactgtacacccttgcccgctctgaccgcttgtcctcatctcctgtagctttcgtttttgttcccgcccaacattgaagattctcgtccgcacgtagactgccgctgtagatacatgcccagtcgcttctgggcccgccctcgcgaccgaccgcagaccggtggcgtagaccgtttcagagtgaaaggctcgcgtcgtgcgcgcggagacgtgccgggtctctcgctgcggcagccccgccctcggcccccgcgcgcttgccccaggccaaaggacccccgcaggccaacaaacgcagcacttcgcgagggtcgcctgcctttcctctcctctcctttccttctctcactcttcccccaaccaacaacaacaacacacagctccgtcgcgtccttccgagggccctcgtctcgcttttgctttgatggcgtacgccttctgcacgctcctgacgtccgactcgtatttgtcggtcctcccttctctcgcgcttcccctcctccttccgcctcttcctccgttgcgcgacctctcgtctgacaacatccgctcttttcctccctcgctcttctcaggcctggcgtcctcgcactcggttacgccctcaagcacctccacccaaagcacggccacccggtcccgttcaagctcgtctgcctcgcgacgccggcgacgctcgccgaccggtcgctcgccctcgccgccgaggtctgggactttgttgtcggcgtcgagccgctcgaatttgagggccaggacgccggcctcggcctgcttggtacgtccctctcccttctcccttagacgaaggcaggtcgtctggacgaccgcttcaacccgcgcgtgaggtcggcggggcatccagcccaagagatggagcgcggtcgccaactcgggccggctggcgcggtgcggaggagcgaaccaaaggggcccgcccgcaagagcctacgctccgctccatctcatctccatgcagggcgcagagcgcaggcgacgacgaccccttcgctcgagctcgaaactgcatcgctcgacaggcaccaaagctgacgaccgagaccttcccttccctgcgcaggccggcacgacctcgccctcgtcctcactaagcttcacgtcttccgcctgaccgacttctccaaggtcatctttctcgatgccgacacgcttccgctcaagccgctgtcgcacctctttgctctcccttacgagtgcgtcaccgagttcgcagccgcgaatcgcctggacctaaccggctgacaccctctggcgcgaccaggttttcggcctcgccggacactggatggcccgactgcttcaattcgggcgtcatggtcctgacgccgtccgaggcgacgtttgatgggctccgagccgtcatgaacagcggcggcgccaacggaggctcgttcgacggcggcgaccagggggttctcaaccagtggttcagcggcgacgccggctcgggcccgcgctggaaccagctgagcttcacgtacaacgtgacgccgacggcggcctacacgtacgctccggcctacgcccactatggcgcctcgatctcggtcgttcacttcatcggccgggccaagccatggcacacgctcgcttacggcgcgccccactcggcgacaaacgcctacaacgacccggctaggccgtaccactacgacgccctcgtcggccgatggtggagcgtctacaatcgctgggtcgccccgcgcctccgcgtcgatggcggctcagtcgctgccgcacccaagcggctttcgggcggtctcgccggcaaggagggtggcttcgtcggtcttgcgcttgatggccgtgaggacctgatcccaccgtcgcgccggccagcggtctccgaggagcccgaggccgtgccatcgccttcgccgccggcgcgccagccgtcgccagagtaccggccgcaggagctccagaagggcgtgccttacttcctgccgtgggacccggcgacgcaggacccgcccaagacgggcgctcagatgtcgggcgccttcccgacgaccgactacagcgccgactgggcgagcaaggccgcgaaccgcccggccggggcgggcgactgggtgcctgacgtgcccgagcgcctccgccacggccggactgagcgtgaggaggcccagagcgccgtcttcccgtgggagaatcagtcgcggccggcaccgacgcgcgtcttccctggcgaggcccggcgggtcaagccggcgacgaccaaaatcggcgcgcccaggcctgacctgccttctccggcccaacacccggcatcgtcgaccgctcctgcgcccggcgtcaagcagtcgttcgctcaggcgatggctggcccttcgaccaacgcctgggacgccgacccggctatccaggcctacgcctcgcttctgacatcgcccccgatccagccgcctgcggcccaccagagtaggggtgagactggccgcggcagccggggtggcgacggcaaccggagccgtgagcagagccgcgacggcggtgctgatggcgacgatgaggagagcacgggcggcgacgactcggacgacgaggccgaggacgacggcggcgagggcgatcgtgttgtcatgcgtttccgccgggacggacccggaggcggcgccggtgctgctggtggaggaggcaacggtgtctttgaaggcttgcggcccgtcaccttttctggcgcgtccaacacgtcggccggcggcggcggcggcggcaacagccagagccgcggggccagtggccagcagcaccagacgcagcaccacacgtcagccgagcaccacgccatgcactcgcgtgccgtccaggcatcgacggaggtccgaaacgcctcgacccagtactcgcccgtcgcacggaccgtcccgctcccgcagccgacctcggccggcctgtcgaccccgccgctcgagtcatcccggacggcgacgagtgccgagaacagcgtgctgcacacgccgtcgtcgcagcagcctcagcagcagcagcgggctccggccatcgctccgccgaacggcggtggcggcgccagtgcggccttcaatgcgcgctttggctttgactcgctcggccccaacaagaccagccagcagccgtcgcagaccaaggtcaagacggccggccggacctggggtgcgtctcttgcgatcctgacgcctgcgcctttcgactgctgatcgctgaccttcgtttccttcgctttacagaccccgaacgtgaggtcgacgctttccgtgaccagacccgtcgcttcctcggtgcccactgaggaccttttcctctgccacaatcttgggcccctccttcttctcatattcgcttttcgactcttgcttcatcctttcctcactcatcccggtctccatctggtcgtcccttcccccttgcacacacttgccgtccctctcgctctccgctgcccctcataccctcttctcccctgcaccgtcttctctgctgcttcccatccttctctcaccgcacatagagcatcccatctctggatgatcgcatgccaacgcttcgcaattgctcgagtcagagaaaacaacgagtgcgaggcagtcgctcgcggccgcttgaaatttcgcccgacctcggtcaactgcgcgccgccgccgcgagcgaacgcagacttgcggctgctgctcggttcctcctgctcgacaccttcgaccagctctctgagcccaactccagcaaccccacaagacagaaggatacgccggacggtccagcacccagtcactccctcgcccggctttccatttagcacgctcccagctctcagttgcacctccagcagcagcagctacccgagccgccgacacctgcacgcagcagccccttccttccctccctccaagctttggctctacctacccacccttagcgcctactcaagatgcccaaggacaacaagaagaccggaaagggccgacgtgcgtgccttgccccccccgacggatcggccggcgcgcgagttctggctgaccacctgatctgctccccgacccctccgaacccgcctcgtgcagttgacaagtactacaaggttcgtcggcggtcgctgctttgctctcgaacttgcaagatgccatgattgacatcttccgctgctttttccacccaaacagcttgctaaggagcagggctaccgtgcccgttccgccttgtacgtcctgtgccaccgccgttgagctctcagctgagccgagggctgaccaccgcctcatccgccttctcacccccaacagcaagctcgttcagctcaacaagaagtacaacctcctcggtacatccaaggtctgcatcgatctgtgtgccgcgcccggaggatggctccaggtcgctcagcgctatatgccggtcggctccctgatcctcggtgcgtgcccgccgccgccaccattgacgacgcaagggctggggctaaccgatctgctctcgcaggtgttgatctcgacccgatcaagccactgccgagcgtcatctcgttcgtgtccgacattacgaccgcccactgccggcaggtcctgcgctcgcatatgaaggactggaaggccgacctcgtccttcacgacggagcgcccaacgtcggaacggcctgggtccacgacgcctacggccagtctgagctcgtcctgatgtcgctcaagctcgccgtcgactttctccgcaagggcggcagctttgtcaccaaggtcttccgctcgggcgactacaactcgctcatgtgggtctttggccagctctttggcaaggtcgaggcgacgaagccgccgtcgtcgcggtgagtcccgtttactcccttcaagactttgttgcaggccgagctgaaccgttctttcccctcggacagtaacgtctcggccgagattttcgtcgtctgccgcgacttcctcgcgccggcctacatcgaccccaagttccttgacccgaagcacgtcttcaaggacctctcggcgctcgtcgccggcgccgagcgcggcacgtcggccgccaacgtccaggccaacgtctttgcgcccgagaagaagcgccggcagcgtgagggttacgaggagggcaattacaccctcttcaaggagatcggcgtcgccgactttgtcaagtcgaccgacccgatcactgtcctcggttccgtcaaccggatgacgttccgcgagcccgaggagaagcgctggctcaagagcgagcacacgacggttgacgtcaaggccaacctcgacgacctcaagctgctcggcaagggcgacttcaagacgctcatgaagtggcggatcgcgatacgcgaggaaattggcctcgacgtcaagaagaaggctggcgaggaggacgaggccgagaaggagctcgagccggagaaggacgaggacgagcagattgaggaggaggtgcgtcgcctgcctttgcgctgagggctcctctcggacgactactgaccatcctcgtcaccgtcccagctcgagcgcctgaccgagtcgcagcagcgcaaggcccggcaggcccggcgcaaggcgcaggagaagaagatgcgggccgtcgtccgcatgcagctccggatggcggcgcccaacattggcgcgctcgagcaccaggacggcgcgctcgccggagaggacgcctttgacctcggcgagggcgagcgcggcatgaagggccggcgcgacctggccgacgcgctcggcgacgagggtctcgagctctcgtccgactcggagggcgacgacaacgcctcggacggctcggacgagttcatggactcggacgacgagcgtgaggccaagacggcagcgctcgagaacgagatggagaacctctacggcgagtaccaatcgcacatgcaggacaaggacgccaagttccgagtcaaggaggcccgccgcaaggacaagacgcgcgagtcgtggaagggcatcgacgagggcaagggttcggacgacgagagcgaggaggatgacaacgaggagggcggctgggagaacaaggagaagaaccgggctgccatcggcgaggaggccgactcgtctgacgacgagaccgacatggagaccgacgacgcaccccgccggagcgtccgcaacggccgcctgctccagaagcttgacgacggctccgacatcagcacggccgccaaggtctggttcaaccagcccgtctttgagggcctcgacgagtttgaggacgatgaggaggaggaggaggccgagatgaccgactcggacgaggacctcctcgacgaggccgaggccgaggaggccgaggaggaggccgtcgaggccgcccaccagatgtcggactcggaggtctgtctctccgtcgacattgacaagcagcccgaagccccttgctgacgaccgtttcgcaaaacctccactcaggacgactcggacggcttcgaggttgtgcccgcggcgcgcgacgacgaggagatgggtctctgggacgtcgacgacgagaatgtcgacgaccgcaagaaaaagcgggttcagggttagtcctgcctctgacccaccagtctgcacgacgcctagctgacatccctgcttccactcgttcagaccgcggtcttatcacggccgaggccatcacgctcgcctctcagctcgtcaaccgcgagaagaccatctcgcagctcgtcgacgacggctttaaccggcatgcctttgactcaaaggacgacctgccggcgtggttcctcgatgacgagagcaagaattacaagtcgaacgtgccaatctccaaggaggcagtcgaggcgctccgggccaagcagcgggcgctcgacgcccggccgattcgcaaggtcgccgaggcaaaggcgcgcaagcagcggcgtgcgatcgcccgtgtcgacaaggccatgaagaaggccgacggcttgctcaagtgcgtcgtctgtttccgactaccgtttcctgttcttggctgatccctcccttgtcctctctcgcctcgcctcagcaacgacgacgtcaccgagcggcagaaggccggccagatcgagaagatcatgcgcaagggtctcgccaaggaccagcgcaagccgatgaaggtcgtcgtcgcccgcggctcgaacaagggtatcaagggccggccgaagggtgtcaagggtgggtggtcactttgccgtggttcgtgcattttaaggctgacaccctacacacccttcgcaacaacacaggtcgctacaagatgctcgacaacgttagtccgcccttggtcgacccttacgcatgcaaagtactgacgacggtgtgctattgttcacgcttgtagagagacaagaaagaactcagagcgaagagacgcaaggagaaggcgtcaaaaccgaatggcggacgcaagaagaacaagtagagacgtcccagcctctgttatgcccccctcgcggtccctcccgcggcccctttacgacattctgcatgcctgtttccatcatattgaacgacacgcctggcgttatctccagctgaagctgtgacctgtcagggagggcaagtgcgtacctcgtcgacatggcgatgcaaggggaggggggaggaggggcgcaccgtcggggctggccgggcggaaacgcagggcgcccgtcggacagcttctgcgagacctcaccagcgagagacctcgccgacctgctctgcctcagcgccacttctgccagtgtcgactctttcttctaggcgacaggtcttcctcgtcgcaaaaagtggcgcgatgcatcggagcagggccgatgctgctctgcgagacggcggccggacgggcagcccgcgcggagggcctgggcctgccattccggcaggcgccgcagccgactcgttgcgcttgtttgcggcgcgccgcctgcgggagcttcggagggacgacgttcttccccttcttctttgcaccattgaccacctctctctctctttcgacatcgcgctacttgacaagatgacgtacggacctcctcccggtccacctcctcagggcaacggcgctggctacccgcaaccgccggtcaacagctacaacccgtacggcaacggcatgagcgccgaccagagctacgtcaacagccagcagtctgccccggcccagaagtacgagccaccggcccagtatgcgccgcccaaggacgagtggtcccagcagcagcaggaccagcagcagcagcagcagtatagcggccagcaggcgcagtacaatggcaacggcaacggacagtacgccatgaaccagagccagccctacgccgagcaggcgccgccgccgcaggcctatggttctcaggagaactttggcagcaagccgagcgagggcgagcgcttcaagcccaagaaggtgcgtgcccacttttggcagcaaaagatgcgcagacggctgactttgtcccgatcgaccccgagtgcagaagctcaacgacccgatcttcctcatcctcttcattgccaccgtcctcggctggggtgcggttgccggcctcgccctcaacggctactcgaccgccgacggcctcggcggcggcgtcggccggggcaacactggcagccgggtgacgctcaactcgagcacggcctacctgctctgctttgtcgccggcgcggcgcttgtcctttcgtcgctctacctgatgctcgtccgggcggcgacaaagatcatcatggagatcacccttgcagcctcggtcctgctcaacatcggcatcgccatctactactggtacacaaagtactacaggtccgtctcgcgcttcgcgggccgcgcaggtcggttgcagaaggctgacgctggaagtgcttgttcacagcggcgccatcatcttcaccatcatcgccgtcatctcggtcgtctgctactttggcatgcgtaagcggatcccgctcgctcggctgctcctccaggtcgtgtgcgtgccgccgccgccgcctacccacgcagcaccccgactgacgtcccccgcattcctcctccagtatggacatctcaaagcaccacaagagcgtctacatcgtctgcctgcttgcgctcgtcgtccaaacgctcttctcgatcttttacgcctttaccgtcgccgctgtctacgtcaagtggacgcccgactcggccgcgtgcgcgcagcaggccggcggctcctgctcctcggccaaggtgacgggcctcatcgtcttcgtcacctacgcctacctcttgacctcgcaggtcgtcgccaatgtcgccctcgcgacgctcgccggcggcgcctacgggggctggtactactacggcccggcttacgagggcaagatgcccaagcaccctaactggaagtcgtttgtccgggcgagcaccctctcgctcggctcgattgccttcggctcgctcatcgtcaccttgctcgagctccttcgaatgctgtttaacgttcttcgccaaaatgcagcctcggacggcaatgcggtcggggcaattctggcgtgcgttgcctcttgctgtatcggctgcatatcgtcgctagtgcagtacttcaaccgagtacgtccgctcgccttgcattcaacgaaatgagctgctgctgattttgagcaaacagtacgcgtacgtggagattgctttgtacgggaaggcgtacattccagcggccaaggacacctggcgcctgatgaaggaccgtggcatcgacgccctcgtcaacgactcgctcgtcggcctcgccctcacgttcggcgcctacgtcactggcctgttgtgctctatctttggatacgtctacctccgcgcaaccgccccagcatacaacgcggacggcgactacacgccggtcgtcatcctgttctccttcctcatcggccttcaaactggcctcgcgctctcgcaggccctcgagggcggcgtctcgaccatctttgtctgtctcggcgaggacccggccgtgtgcgtctggctcagactatcctctcttgcgaggagcagcagcacgctgacgcccctcctccgcgtttgtcagcctcgccgagcgctcccctgctctcttcgaggaggtccgccgcaactaccctcgcgtcgtcgagggtgtgccgtaccacggcgcatagaccacttgttgtctctcttcgcctcctcccttccgctttcggcccgcgcattgcacctacctactgcccgttccctcgataattcacctcgcctgcgaccctcctaccgtctcctgacgcgctacgcatctgttacaacatgaagacgttcaaggaacgagtcggcgagcgctcaacgcagcgtctggtgcatcttgaatcgaagggacgagaacgggtaatcctgcccgtcgtcgagcgtacgcctgtgcgagagcgaagcatattagctcagagtgaggcgacaggaagcgagcacaaggctgacgactcgggcccccagatgcgaagcccacggatgtgcgtgtccttcccgttcaaatggttggcaacgacagtgatctggacgaggaaggcgctgatgggctcgctgtcgaccggcagggcaacgaaagagcgtcagcacacgtgaagggaggcccgttccaaaaagcaccagacgcacccatcgtcgtcagcctggccgccgccagagtcgcgcaagtcgatcgtctgccagccctctggcttctcgaactggacggtcgtcacctgcgataataggagcctcaggtcagacggggtttctggcaagctgcgccgcgaagcacgtcgactcacctcggtcaggtcgtgcttgcccgtgccagctttgaccgacagcttctgcggcgtgtaagaatcatctttcgcgtgcgacagcaacagcgagatcttctgctctccggcggtaaggtcagccggggtcagccgggtcgagctgggaccgtctgcaagagcgacgacgcacgacgatcggcacgaggtgcgggaattggagcgagatgctgtgcggttgagggccttcggacctgcaagaagggaactagcatcagccgtcgctcaagccgctgtcgccctgctcgcaagggactgactgccagaagacgtcctcgtccgggtctcggaggttctcgacgccgtagccatacttgtgggacgagacggaccagctggcaagcgagccgagaacacggagatcagagcagtcatcttgcgagcgcatcgccgacatgtcgaccgggctcgtcgaccgaagcggtcggccaagataggagggagaaggtcgagtgctgcgacgggcagtgagagtgaccgtcggagggagccggcgtcggagccgacgagaaagggtcggccaagaccagcagcgtcgtccacagatggctctcctctgcttctaacagagttgacaggactgaacaggtcaggatatggtcatgcaagagtcgcctgtccctgtcagtcgaaggggagggctggagatcatgctcctgacctaagctggccggccatgctcctcgaccctcgcccgctttgctcgtcagccctcgacgccgaccttcctccttgccccgcttgaccatgagctccttccgccgcctcaagccctcagcgacgccggccgcgcctgtggggtcgctcgccttcccttcgctcgcgctcccccacctttcaaccggcgtcgcctcgctcgacgacgtcctcgctccgggccagccgctctcgtcgacgctgctcgcccggacgccagacggccacacggcctgggctcgccttctcgagcgctattggatcgcccaaggtctcgtcagtggccagggcgtcgtgatcgtcgccggtccgggcgagggcaaggacgtcgcccagggcatgatgtgggacgtcaatgcgctaaagcaggcggcgcagacggccgaggcggcagaccagtcgggcgccgagagcgacggcgaggacgtcctgggcgacgtcgagatcgaggcaaaccggaccaagattgcctggcgctatggcggtctcggcaagttcaaaacgacggtcgacagttcggcggcctctggtaagtgagccggcagacaagcaggtagaacgagagcctgaccgacgagcaacgccctcttcagcgaacgccttcggctacagcctagcgctgacgggcatcatcccagctgcgacgcttgctggcctggtcgacagcggccagctgaagtatctgccagtcaggccgtcgcggaagggcaagggccggagcttggacgtcgaggccgagctcggccgcatcctgcacgagcttcaggccctcgttgatcgcgaggactacaggtgcgccgtccgaatcaactaaagcgcaacgatccgctgaccggcagctccggatgttctcgcagccacgcctcgacgtccaagcagccgcaccgggcgcttcgcatctgccttccaaacctcttttcgcccagctggggcgatgtctcgcacgccgtacgcactgcctgccacgcttcaagtttcgctcgtggcaatggctgaccttctgaaccctacctcctgcccagcacatgttccgcttcctcatgggcctgcgcgctcttctccggtcctcgcgggcagccgcaatggtgaccctgccgcccgacctgtgtcgcgacaagccgctgctcgagcgactcatgtgggcgaccgacggcgtcatagagctagagggctttggctgtatgtccttcgcttctcttgtggaccaggatgatcgcctggtggctgacgctcctcacccagccgacccaacgttgcccgaccttttctcgcatcaccacggcctcatccacgtacaccggccgttcaacctccactcactggcgccgccatcgcttaagctctcgactctggtcggtggccgtggcgggcagaacaacctcgccttcaagcagaagcggaaggcgttcgtcgtcgagacgcttcatctagacgtcgaaggcggcgtcggcgagcgccggacgacagctcccccctccttgacggcctcggcgcacgcgcacgaccatgccgggcactcgcaccacgctgattctgccggtggtgagagcttggcgccgcagactggcggcggccgagtccggatcgagatgcccgaggttgcgagggaggttggcgagatcgccagcgccaccgaagcgccgaagccggcccggccgatcaagtcggccctcaagaagaagtcggtcggctttgccatggatccatcgaagcccgagctgtatgagttctagatgcgatgaagctctcctgacgtgaagtgccgtcgctcgatgagtacgcatgaaggcgcagaggagcctctcgcgccggtcgtcgtgctcgcaaccagctcgctctcgtcctcctccagcctctcaccctcgcccaacatccgtttcgtacccggcacagcagagcttcgtgcgcaagatcccagcccgttagtcagcgtcgcctggccgaaagtacatgtccgtcgccccatgcaggagcttccatacgcagagctcgacctgccgctgacctcctcgcctctccgctcggactcgctgcctgacccctcatctagaaagggagtagaagacccgcatctggcagccgaccaccctcccgcatcgccgcgatggcgaagaagaagaagtcagccctgccggccgtcagcaggtacgcgtgctcgcctctccgccgtgggctcgagctcagcctctgatcacactcaggctcactttcgcgttatcaaccccgcagaggcttcgcgacgacctcaatcgcaaagaagccgcagccggtcgtcgctgctcctgtcgacgacggtgctggcgaggaggccgtgccgggtgcggaccccacgggagccggagacgaggtcgcgggcgcgggctcggctggagccgagggcggcaagggcgtcgccgaggaagaggactgggagaaggaggagggctacctgcagactctggtcgacaagctgcaagataaggtcgacaaagagattgctcgaacgctcaaggtaggtcctccgtttcggcctgacgtttgggccagcgagggctcggccgagctgacctgccccctcgctcgcgcagaccatcgagtttgagaagcgacaggccaagacgttctcgacgctcgatgtctcggacgacgtacgcgagcgggcgcttgccatggctttacgtgctgacgaggaagagaccaacagtcggtcccgacgacaagctggaagcgcgcatcgagccctgagctgacactgtgcctgcccattgctcacagcgtcgactgtcgcccagtctgacacggacaaggtcctcctccggctggcgatcactcacggtgtcctgttgaagttaggcttcagccgagagcgcgtcgaggagtgcctgaaagccctaggcacgagctgggagctcgaggatgcgctcgactgggtcggttcttctcgtcaccatgcgcccggcaccctcgctgaccgactggcgcataactctagctctacctccattgtccagaagacgagatcctcctccaaggcaactggtcggtcaagggtcggtccgccgcgaaagtcgcttgctcccgactgatcgctcggcgctgactcgacctgctgcgcacgccgccctgccttttcagactcgcctgcagccgcaccgtcgacaccggcgacaccactgcctccttctcgggcccagacgccaccgccactagagagaccgctctcgccaccaccgctagcggcaacacctgcgcgcgagattgccagccctccagctccgcgggtcgaggtcaagcgggcgctctttgcaccggccgccgacggcgacgacgactcgagctcagaggaggaggagatcatgccctcgtcagagtacgccaagcttcggatcaagctcgacgccatcatcggcccgcccgcgcccagaggcaaggtcaagggcgccaagaagaatgcaaagcccaagccagccatggtcgttgccgagcccgaggaggccaggcgaatccgcaagcgaatggacgctgtcaaggccatgtacctctttcaaaaggacgaggccggtgcgtcgctgacgcctcaacctcagctcgggggccctcgctgaccggcttcgcgatctccgccccggcagagaccgagtacaagacgatgcgagacaaccttgaggcagaagccctcaaggctcggctccgcggtgacgccgctccgccgacgcctactgacgctgccgctgacggctcgacgccgcccgaggcttcggtcgccccctcgcccgcgcccgacctcgagcccgcgctgccggtcgacactccgtcgagcagtatcctcgacgtgaacgacgacgacggcgatgcgccggacgccttgtccgccgtacgtcggccgctcctgccgcttgctagatctaggctgatccgcctttgcggcactctcagctctttgagcagacggaactgcaggcgccgacccccgccgagccggccctcttcgtccgctcgctgccgctgcccaagcactttacagcctcgaccgccgccccgaagacgaccctccagacggcggccatcaagctcgaccgattctgcctgatcgattacacgacgctgagcaactcgttccgcgcggcacgcgtcatgctcaagatccggtggtccgaccggcgcgagcaggcctgggcgatggacgacctcggctgcagcaacctggccgaggcagaaagctatgtcgcgacgcttgccctgcacgacatcattgccgttgagggcaagggcgaccggagcgtctggcggtcgttcccgccggcctaccgggatctctgggacgagctcgaggaaaagcgcaagggctcgctcgacaaggagcgacgggccgtctgggcgaccctgcgtgccatcgtcgaggcccgctatcccccagatgcgcctgccgaggcgtccctggtgctcgaggcggccgtcaagattgactcgaagctcatccccggcttcgacttcctcccgccacccccgaaggatgtcgaggcggaagctgtcaattcggtctctctccagctacagcaggagtttgctcgccggcaggcgaccccggcctaccagcgcatgctagtgcgtcacctatcggcgccggccattgtcccgagcgtcttcttagctgatcagccggcatacttcgccctctgcctacagcaacaacgcgagacgcttccgatcgctgcctaccgcgagaagatcacgtcgtcactcgagacgtcgcagatcctcgtccttagcggcgagacgggctggtgggttggcacggcagcttgctttcctcgagccgccctcctgaccttgctctggccgccccacctttcgcagtggaaagtcgacccagctgccgtcgtacatcctcgaagaccagctgtcgcggggcaagccctgccgtatctacgtcaccgagcctcggtgaggaccgctgccgacgagctgaggatctgcgatcttcccagctgatccgacctaacgcgtcttgctagccggatctcggccatctccctcgctcagcgcgtctcgcaggagctcggtgatgcgcccggccaggtcggctctatgtcgtcgatggtcggctactcgatccggctcgagagctgcacctcgcgcaacacggttcgtcgccgtcgccggatgagattcgccttggccgcagaacctctacactgacgcgatccaccttcttgccagcggcttgcctttgtcaccaacggtatcgctctgcggatgctcgagagcggctcgggcaccccagggagcaagagcaccgcctttgacgagattacggtgcggctctgtcgtctccctgtgcccagcatgttcccggctgaccagcctcaccctgcacagcacatcattgtcgacgaggtccacgagcggtcgatcgagtgtgcgtccaacagctgctgcatgcgccgtcctcgttgctgactgacgtggccgccgttgttcagccgacttcctgctcatcgtcctcaagacgctcctcgagcagaggaaggacctcaagtgcgtcaacggaagtcttggtggaagaaatgaccatccgcaagctaacgccccgcccaccttcgcccagggtcgtcctcatgagtgcgacggtcgatgccgagaagatctcggccttttttggcaactgtccgacgctgtctgtccccggccggaccttcccggtcaacagctttttcctcgaagatgcgatcgagttcagcaagtggttcatcacgggcgactcgccctacgctcggcgctgtcagtcgccgtccgacctctgcgcggccgcctttggcatctcagctgacgagccttttctcccttctacaaacagatggcaagtaccagaccaagaaggccgccgtcgactggaacgaggacgtcatgatccccgacgacgatgacgacgaggacaaacccaaggacgcgcctgtcaagctcgagaagaagtacggtaccaagacggtcgccaccgtcaataacctcgacgagcggctgatcccgtacgatctggtgagttggggcgcggtcggcaagctctggtgagcgcctcgactgactcgccgccgccaaacagattgtccgattgctcgagcgcctctgcttcgaggacccggcctatgcgcagttctcggcctcgatcctcatcttcatgcccggcctgtgcgttcactgctcttcttctgagccttcatgtttcgctgacatcccttggcgtggctctgcagcaacgagattcgccggctcaacgatatgctgcaggaacacccggtctttggcagcgcgggcttcatcgtcttcccgctgcattcgaggtgcgcccgaccgcccgcccgcctcgcgccgctcttgcgctgaccgcatcttgctcgaccgtcctgtagcgtctcctctgagggccagagcgccgtcttcaacacgccgccgccgggcgtgcgcaaggttgtcatcgcgaccaacattgccgagacgggtgtcacgatccccgactgtgtctgcgtcatcgactcgggcaagcaccgcgaaatgaggtgcggcagctgtggcctgtacagtcttcgtccggactgacatcccgctcgctgcgcagattcgacgagaagcgacagatctcgaagctcgtcgagacgtgggtcgccaagagcaacgccgcccagcgccgcggtcgggccggtcgtgtccaggagggcctcgccttccacctcttcaccaagctgaggcacgacactcagatgcaagaccacccactgcccgagatgctccggctctcgctccaggacctcgcgctccggatcaagatcctcaaggtcaagatgggtggctcgatcgaagaggtcctgtcaaaggcgctcgacccgcctctctcgctcaacatccagcgaggtgcggatcaatcaccaactcctctctggccgaggccgctgacctgctcttccctcccttagccgtctcgagtctcgtcgaggtcaaggcgctgacggtcaacgaggacattacgcccatgggccgtctgctgtcgaagctaccggtgcgcccccttctgcatgaactcccctttatgtcgacctttgctgaccttgtgggctcgatgcgctcacagatggacgttcacctcggtcagtccgatgacaagctctccctcgacgctcggcaggcgctgacttgtgtgcttcctctgaccgcaggcaaatttctcctgacggcggcgctcttcaagtgcctcgacccggcgctgacgattgcggcgacgctcaacgcaaagtcgccctttgttgcgccatttggctttgagcaggaggccgaccggatgaagctctcgttcaagactggtacgtgctagcgtctgccaaggaggagaactttgctgaccttactttcctgcttcccgctccgcagacaactcggacttcctcaccattcacaatgcctttgcgagctggcggcgggcctcggccaacccgagctttgtccggcagttctgccggaaaaactttctctcgcaccagaacctccagcagattgaggagctccggcagcagctctattcatacctcgtcgactctggcttcatcggcgtcactgacgagcagaaggcggctatcagccggttcgtcctaccccggaaagccgctcagcgtccgtctagaactgacgcctcccttccgccttcctcgacttgcagtgcgcgctacgctcgccgcggccctcgcttcgtgacgatcccgccggcgtttgacgtcaactcggaggacccgcacatggtcagcgcggccctcgcgtcgggtctcttccccaagatcctctcgatcgacccggcgagcggccagctcaagacgttcagcaacagtcaaccggcgagcatccacccgtcgagcgtcaacttccgcatcaagcccgcgaaccggcgcgaggagtttggcaccaaccacctcgcctttttcaccatcatgcactcgaagaagctctacgcctgggagacgtgccccgtcgacgaccgtgcgctgctgctgctctgcggcgagtccgagttcaaggtccgtcccccgacccggaacccgcagagcaagtcttgactctccctccgactgacatatgctcgtttcctacgcagctcgcctcgtcctatgtccagctcgaccggaagttgcgcttccaatcgacgcccaagacgatgatcgccgtcaagcacatccggtcgcagctgagcgccgtcatcaactcgcggatgcgtggcaaggagatgacggagcggcagctcgcgtggtgggaacttgcgcttgaggtgctcggtaaagaggccgacaagcccgagacgctcgaggtcatgggcagcaagacagctgtcaagtgagaagggggacgggagggagaaggtggaggggactgtactcgcgcgtggcgttgagtttcgctctcctcagccgagggtatgccgtcagtacggtctgccctcaaaattatagacaagctacactccatcccatccaacgagattgaagacgacgggcggagctagggcgtcgccgttcgaaccgagtatggggtgctgctgcgctgcacgcgccgcgtcagcagctgcaggggcgaggtgaggccgaggcccttgccggtcctcttaaccacgtcctcttccctctaggctaccctccaacagtcgctgcgaagcctcctgcttgtcgccctcgtcggaacggactcgtagctcgcccaaaacttgcatgcttgtcaggcagagcggtgcccggcacgtcctggcgggcggcgggctcgccctccggccgtgtcgagctccgaccactgtccctgccgccgttaccttcgtccgccgagctggctctctctcgacccggcgtccggccgtcgtcaagtcggacctcgtgcccgaggtgacgcccaagacgcgggccaagggcagcgcctcgtcgacgtcggactttgtcgagcgctacatccccaacctagccaagctctatcaggcggtcggcaagcggtcgaccgagacggccgtcgcgcgtcctgccgggccgaccacccaggccgagaactttcgcaggagtctcaagggtggccgggtcgccaagttgtcgggcatctaccgcgagctgatggccaaggtccagcccgggggcgagatgccgatcaaggtcgaagagctccgtgcggccatccagctcgtcggccgggccggttccgacgaccactggacattgctcgacacgatggcccgcgacctcgagacgctctttggctcgccgccgacgctcgaggactaccgggccgtcctctactttctcgccaactcgtcgacacctcgggcagccttccctcgactcgagacaatcccgctcggcgtgccgatcacgacgaccgactttaacatcgtcctggccggcctctcgcgagcgggcgacctcgaggcactccggacctgcatggagcagctgccgctcctcgaccttcagccgaacgagcagacgatgctcctctttctccggggcctcttcgccgggcatgctgccgcgctccccgacgtcgacctcgctgccctgcgagcagaggtcagcaaggcgctcgacaacatgcggcctcgcggcctgcccgaaagccccgagatctgggctgtccttgccgagggttacctccaggtcggcgacctcgagacgagccgcaaggcgactgacgctctgcgggtggcgctccggcatgcccgatacgagagcctgagcccggtcgcttggacatcgctcgtccggtgcacgagcattggcgagagctcagccaaagccttgcgcgaggtgctcgccatgaaggaggccggagtcacgcccgatgcctcgacgatccaggcgctcattcagacggccgaggtcggcacggtcgaccaggtccggcagctgctccagcaagtcgagagcgtgaccggcgtccgctcgacggcgtcacactgggcggtgctcatcgaccgagtcgtccaccgggagggcggcgtcgtcacccgagccggcctcgacgaagcactccaggtctaccgcgagtcgcgcaacctcgccgtcgacccgagcgccgacatgattttgccgatcatcgcgacgctctgcaacccgggctaccaggcctcggacgaggcgcgcgagtcggatctcaacacggctctcggcctctacgacgatctcctggcagccgagcaggagcgctacctcgacattgtcgccgagccggtcctcgccgtcccgtgcgcgaccgacgtcggtgccttgctcgagcctcggacaccgtcgttcgggccgacggtcgaggtctacgacatcctgctcgaaggcatcagcagttcgcggacgctgcgctcgcacgaccaggcctgggagctcctcggcgacatgaaggcccgcggcctctactttgagacaggcgcaaccgtccggcacatcaaggcctttatggcccgggcaaagacgcacaagtatgcgttcggctgctacgaccgcttcctaaagctccacccgccggcgctcggcgcgagcagggaggccttcctcgccgtcgccgacgcctttatccactcgtcgtacccgacgcaagtcaacccgcacccgcggctcgtctttgaatttatcaacgacatgcgccgcgccggctacgacgagggccacgccgtcatgacgacgctcttttcgcagctcgccaacctctcgtacaccggggccgagatgtcgacgcgcgaggaaaacgagaacatcatgaagcgcatggcgtggtgcacgcggctcgccgccgcctggtgccggaccgacccgttcatccaggtgggttgtcagcgcccttcgtgttgcctcaggcgctgagctgatctacccgcgtttcctccggcttcagatggacaagcacctgctcaacgccatgatgaacgccctcacccgggtcggcaacttcaaggacgcctacgaggtctggcaaatgctctccgaggctgagaactacgaccaggcagccaataacgcctccgtcaacatcgtgcgttctgcttgcggcgccctcactcgcctctttcgactcgatagctgatccaatctcctcccctttcgcgctcggcccagattctcgacgcaatcggcctacacggcaacccgttcatggccgagcagctctggaagtggctccgcgacggctcgttcccgctcacgctgtccaactggcacgcgctcgtccaggcctgcctccggctcggcgcgctcgaactgctcgtcaaattcatcacggtcgacatgcgccagaacctcggccacccaccggcgccgtcgccgacggccgagacgctgagcatggtgctcgcctaccaggacgccttccggcacggcgacctgaaccgcatccacctccgctcggcgctcgagagcgccttcccagagctttggccccaggtgaaggacacaccggcgaaggactggtggcagatggagatgctcgacgtcgagcgggaaatgggcgacgccatcaagccgctgctcatcggcactgagtttgaggacggcttcgacgactacgaggccggatccgagcgcgacggcctcgacgaggagctcgccgccgaggaggaggagatcctgctcgcagagaagcaccgggcggcggcggcatcgacgccgtcggtccgacgagcggccgccgggggctcatagatggtccctcgtcaaaagcatctcgccgtccttggttttgagggcagtcgcgcgataggcgtgcatttggggcggttgctgaggctccaggtcgacgtgacgcgagcgcaggcgaatgacggagcggggtgaaagaaccccggctacgagaacgatcgagctcgcccgctgggtgcaggttccgggtcgccgtgaagggcggtcatgtataagcctggagaacagctatatgcgacggaaggaagggggaaatgttccggacaggaaaattggggaagggcagagtggatacagtcgctccgaggagcgggagagctggaggctcgctttttaagacgagtaagggatgcgagaaccagcgtacttggccttgggcgcgccgacggccgcaaactcgccgccgacaacgttggtcgccgtcgtattggcaccggcgccgccgaccgtcgcctgctcctggatgttgatgttggggcagcgtggctccgagatggtctttccgtacttggcgccaaagaagatgacgacgccgttcgtccaaccaaagccgaccggcgtctcgtactcgccgccgccgccggccgcgtcaatgtcggtcgcgttgaactgcgaaagggggcaaaggaattagtccctggcggaccatcgagtctgccgcccctcggaccgaccttctcaaacatcttgccggtcgactgagcgttcgagttcgtcaggttgagctcggtctcgggcagctgcgcgagtaggccgtcgagcgagccaccggtcgagtacctgcgcgagaaggacgagcgagatcagtcgctgcgggcagtagccgtcgtgtcccgcgcagatcgacgcaccaggagcagaaagcggcctcggtgtaacgctggacgatggcgtgctgaatggcgtcgcgccaggtcgtcgactcgtcggcatagtcgtcgtgggcctgaatgccggccgaggtggcgttggctgcctggccgggctgctcgggcaggtccgtctcgttcatgccgagctggccggcagggatgaggtcccagagcgtgccgttcgtcgagttgacgagcgaagcgtacgtctggctcgtgacgttggcgctgagcttgtcgaggccctcggcgaggatgtactggagcggcggccaggcgttcgggaagtcccagttgagcgtgctctcggtcagcgaggccggaaccgcgccggcgtatttggcgagaacgtagtcaattccagcatatgccttttgggcggccgcaggatccgtctggagctcaggcgggaagatgtcgagccagtaagggaagaaggccgagagggcccagaagtcggaccgggcgtttgacgtcatgttaaagtcgtagaacgagtacttctcggcgtcccacatgaggtcgagcatggcctccttgcccttgtcgccctgcatccggtggaggtcggctcgggcggtcgcgttgctgagcgacgacgagttaccgccggtcgacgagttgccgccgagcgagaactggtcgtaaaggtcggcgagccggtagtggttgctcgtgaggagcgcattgaggtcgaccgggatgatcgaccggatgttgagcgagcgcaagccctggagcgggtcgctgacattcttgagcggctccttcatccagcgcgcagtatagtcccagcccgactcggcgccgctcgcgagctggacgtagaggtcctcggcctcggtctcgttcagcggcggctgggcgaggttgaccgtctcgtagtcctcgacgtagccctcaggccgagggccagtgttgaggaagactacgagggcggaatgtcggtcagcaaaagaggaggctgcagggccaatcgagcggaggagcgtaccatcgtagcgggcgacgtcgtacgacgtattggtgaagggcgacgtgacagaaagcgtccgattcgtcgtccagaagttaaactcaatgtccgcgaggggaagcgcgcgctcgaggatgctcgtgtcgttggtgaaggcgacgtatctgcgagagaactaagcgttaacacccggcacaggagggaagtagataggaagggaacggactcggcgaccatctgcgtgaaaacgggcggctgcgagcggttcaaatagtacctgccgaaaaggatcgcggcagtcagcctcgtttctctcctccgtgctcaaagagtcaacacttacttgcggccgccgttggggatgctgtgagacacaggcctgctgtcagctgacgctccacacgttgccagcaaacgtgtcactcacaagccgtagaggtcgagctggtccataaagttgttgaggaggtcgagcgcgtactcggagagctaccgggcagaagaaacacacaaggtgtcagccttcacctttgcctcaaaagcaggtcagcgagagcaaactcacgcccgagtggaggaggccctggagaatccagtacgagtcccagtaatagacctcgcggtagcggccgccagggacgacgacgctgttgttgagcgggatgatggtcgagtcgcagacgtcggggctcgtgcatagggccgattggttggtctgcgagcggagagatgggcgcttgtgagtgaagatgcggacgatgagcagatggagcgaggcgaaccgacctcgcgaataagcgacgaccagtagccgatgacctcggtctgccaggcccgaatcaactcgttctcgacgtcgggaaggaaggcagcggcagaggggctgaagttcgccgagatctggacaggcacgagctcggtgccctcggcgacctacggggcgagggaagtcagcgtcaggatcgcgaacagggaaggaaagaccggcggcgcacaaagtagtcgttgaggaaggtctcgagctcagagtaggtgacgttgccgtttgactcgcgcagggcacgccaggcggtgacagtctcgttcaggccatagcgagtcggcttgtcggggaaggtctaaggttgagcaggatcgcatggtcagattcgagtctgacaaaagtcgaccagtcggcgagaccaaagcagagccagatggtcgctcaccttcgagtcggggaagaccttggcgagctcgactgtgttgagaatgtcctggccggagcaatagatggggtcaaggcctgaggtgaagagcgatggccagagggtgagtcagtgcgtccgaagcttggccgcagcccgcagtcattcagttctcgcgacgcacaccagctctggactgccgggatgggttcgaggccgacgatggcgtccggggtgagcgtcgacgtggggctcgcagtcgactcagcctcgacagtcggagtcggaacggctccgctctgggtgtcgatgctgctcgaggcgaccgcgggcgacgagccggtctgggtgctcccggcgagctgcgtcgtcaccgagccggtgatggacgagatgggcccggcgacggccgagctgacggccgacggaacctgggcggcaacgagacggccgccaccggagaggaggaggaggggcagcaggatgggctgcatgattgcttgaagggaagggggagttcggggggaagaggagcggtcaggatgagcgaaccgtgagccctttttgaaggaagatggcctgaccgcgggcgacccaacagagctcgtcagcgggctctagccgggtgccatgctctggccaagcaagccgtcgtggacgaccggcgggacccgggttcgcccctgctgtctcgagcgcgaccggaagggaaggaggatgacgacggagagtggagcgcggaaaggagcaagttcccacgcacaaaactcgaattcgctcgcgacggtaaaacgcctgtttccccgcggccctctgagccctttcccttactttcctatccattccttgtcactggaagagctcgcgtgacgtggccaggactggttcgtgtatcatcgcaatcaggtcgtcaagaggaaagttgcctagaaggagatgggaggggagaggacgagttgccgaccggcggtcgatcgtccgtcggggcgccggcgaccgcgggcagggattgagagattcggcaagtggcgacgccgaggcgaagccaggtggcggttgccgccggcttgcccagacaggtcgcccgtggaggccggccgcagtaggcggagtgaagggcggaagcaccttccaatggcaaagccaagaggctgctggattgaaaggggagactccggacgagcgacgccccgagtcgacgcccggccgcgagcccgaaagtcgtaggtgagggaggtgagggtgtgcgctgtgtcgtgctggactaggtcgagtgaagtcgaggagaagggccttggctcaagagctggacagaaagtgatgttgcacgagggtctgcgcgagatgcgtcagtcgtgcaggtcctgcagaggaagcaggaggccacacgcaccttcccgcccgactagcgcttcccgccgaagccgaacctctggcctccgccgttccggtcgacgatctttgcccagactctggccagactgacgacgttgccgacgaggaagccgacgacgccgacgacgaccgagacggtgatagcgacctgggccgcgcagacgccactgacggcgaccgtcgggtcgcgcatgcggacgctcgtccaccagcgcgagctctcgggcgcgcagtggagcgggctcgtgaagatgtcgctcatcgtgagcgagaggagcgaggcccagagcgagatgacgatgaggtcgagcgacgtaaagaggagcttggacggcagcgaccaaaggccgatcggcttgccgaagtactcgaggtagacggctgcgaggacgtggaggagcgtcgggggcgagtagatgatggcgacgagcggcgacggcccggtgatgccgcggaggccggcggccgactcgaggttgcggattcggacgccaaggccgagcgtcgtgcacgtcagcgcaaagttggcgagccggaggacgagcggcgtccaaaacgagtagagcgtccagcgcgcgatcttggccttgacgccgccgcggaagcccccatcgccttgcgtcgagctaaagtccttctccgagaggtgatcgcttcgagcgcgcgagagcgaccggccgtgcgccgccgcgctgcgtttcgaggcgaacggcgcgtaagcctcggcccagccgggcgtcttcgagtgatgctcggtgtacgtcggatgaggctgaggggtcgggagcgaaaggcgaaagttgggccgatgcgaggcccttcgcggccgagtcggggtcgcgtacccacttggcgacgcaggcagcgggacgtcgccgagctgactcggcgagcccgactctggcccctcgacgaggctgctcggggtgttgggtcctcttggcccgccgccaccgctgccgccgagcatcgagggaaagtaggagcgcgcgccatcgtgcggctgagccgtcccggacgacgagcctgagccgcccgagaacttgccccggagcgaggccggcgtgatgatggggttcgcccaccaactcgcacggcgtccaccaggaccgggcgcggtcggcgtgccttcctcctcgacgccctcgagtccgagactggtttgctgcttctcgaggtcgacgccgctggctgaagccgtcgagccggtccggccgtgggctgtgctcgagtccgacagctccgacgagaagcgcgtccgggtcggcgagatggttgagcccgagctcgagctgccggtaaacggcggaaggagaagctgggacctcgtgtgattgctgctcgggccagcctgctcgggcggagcccgggacgacgagctcgacagctgctggaggttgctcgacgaggtcgaggtgaagaggggcgatggaagcaggccaggcgagtctggtggcgtcggcggctggcgctgagcataagctgcgagggacgatgagcagacgtcggtcagcgctctgagatcatgtcgttgagaaaaagtgaccagcggctgaggcgaagacagggaggggggagaggttgaggcaaagcgcagcaacggaggcggtggggctgaggcgggaagtcagggcaaggacgtacgaggctccgtccgaggcttgcgcctcccggccgagagctggctgccggcagcccgacctgccgtgctggtactggcctcgcttggcttcctgcttgagcctgcgccagccgctttgcttagtgtcgagcccgaggcatcggatcctcctcggcgccgtcggtaggggtcatcagcggcgagcgcgccgggcgtgatcgagctcgacgacgtagccgacattgggatcccgccggcgccgtcgtagggcgatcgcgagcgtgaggagctgggagttgggtccatgggcgcgagctgatcctacactgagacggggagcgaaggggaagtgggagtctggaaagggcgaggcgagcgggtgaccataaggggggagtcggcgcgagcgagaggaggccgcccatgctcctgatccgccgccgacgacgacgacgacgaccaaccctctgctcttgccagctcgccaatggtgtctttcccgactctccagctgccggcggccgtgacgtcggcctcgcctcggacgctcctgacgacctcggtcatcgtctcgtcgaccctgacggcgctcacgctcctctcgtttcagtcgctccggcgccggacgctgcgcgagtcgctccggaaggacgtccagcgctcgctcaacaaggacgagtatgcccttcgggacgagggcttccccgagccagacgggcgcgacgcggcgcttctcgccgagggaggcgtgccaggtctcgacggtcgtgagggcggcagctccagctctggtgcaccaaagatcggcaagaagcagttcagcgaggagctcatccgcgagcaggtacatcggacgagggaggtctctgctccgagtgtgcgtcaacgctgaccttgcttgtgctcgcgctcgcagctcgctcgcaactacgtgttcctcggtgaggagggcatgataaaggtccgcaaatcatacgtcgtcgtcgtcggctgcggaggcgtcggcagctgggccgccctcatgctcctccggtcgtacgtcttgcctgtcggccgtgagaccgtgtggaggcggcaagctgacttctagcgtggaccgtcttcagcggcgtgtcgcacattctcctcatcgacgtgggtgcttctcctcttcacctgtaccccagactctaccggatcctgattttcctggccttctgtctgcagttcgatcttacaacgctatcctctctcaaccggcatggtgcggcctgtcgtcatcagcctcatcgccggcaatgctaacgtgcaacgcgcccgccatccagcctgcgcgaccctcgctgacgtcggcacgccgaaggtcgtcgccacaaagaagtttctcgagaagattgctccctgggcgacgtacgttaaggatctgtgcttgtaagactcgaagggctgcatctgaccagcgtcgccctgaccccttcgatgctagcatcgacgtcaaggtcggcctctggcgggctgggcccgagggtgaggcgctgctgcagggcgccgactgggtcattgacgcgatcgacaacctgacgaccaaagcccagctgctcacgtactgtcacaagaactcgctcaaggtcttctcgtcgatgggcgccggcgcaaagtgcgatccgacgcgggtccagattgccgacctctcgacgacgcaggaggacccgctcgcgcggagcgtccggcggctctgccggatggagggcgtcgtctcgggcatccccgtcgtctactcgaccgaggttccgaccgacgtaaggctgctgccgctcgacgaagaggagtttaagaagggcaacgtcaaggagctcggcgcctttgatgacttccgcgtccgcatcctgccggttctcggccccctgccggccatctttggcctcaacatcgcgacttacatcctgcaggatctcgctggccggcccatcctgcagccgatggaggtccgtctgcctgctgtgacgaccgagcaagaccgaagttgatgcccttcctctccgtggctcgagcagcaaaagaatcgcaggaagctctactcaaagctgcacaacgaccttgtccagcgcgaggcaaagtatctgaagatccccgagggacagtgagtcggcttcctttgtttcctgcccagctgcctgctggctgacccgccgatcgctatctttccagccgcatcacccttgatcaacaggacgtctcgctgatctacgaggagctgcaccagtcgggccgctcaattctcccatacccttcgccgtcagcctccaagacgccggccccgtccgccaaactcgccgagcctttctaccccttctcggcccacccgatcgctctccgcccggccctcgtccgctgggacttgaccaaggagctcagcgtcaccaactgtgtcgtgttagagcagaaggatgccgagcggcacctccagctctgcggcgtcgagggcaaggcgcgcgaggaggtctggggaaccgaggtcgagaagggcgttcatgagttgatggcgctcgccggccgcgtcctggcctggcgcgagaaggaggcgtgagtatcgcatgcgactccagacagacgtccggactatccaggtaaagaggccccagttgggggcttccaaagtgggagcgagatcttgtcggatcgagcccaaatcttgcccactacaagcagacgacggtgcctggttgtgattctgccccctaaccgaggggtcaatcaggcggttcgggtggaatcgaccgggaaagggtgttgacgcctgcgggggcgggcacgcgggggggttgagcagaaagtcgtccgacagcagcgagaccggtatcgcttgatagctctcgatgatttgaccccagatcaagaaaattagcggtcatccgatcaaagggtggcaaatgaagtcgcgtagacgtctgacgcccctatacttctgtacacccccactgtagtctcgagccagctgcccaagctgtgaggaccccatcgtctccgcggcgctcgcgtcctgttattgctcgagcagggcctgacgcccgacttcccatgccgcctgatactcgcagttcacctccccgtccgcctcatcgtcgccatgctcgtcgcccctctcgccagactcggcctcgcgctcggtttgctggccccactcgccctcgccgtccctggatcgaccttcaccggcgtgacctgtggggacgatttaggagagacgtgcccccgcaagcctttccctgagagcagctttaccgtcgtcgcctgcacgggtgagagttttgaacttctcgtgctctgtccctctgacaccgccaatctgcacatgttgaccaggtcgctcgcttttcttcatcttaagacaacggcaaattggaggactaccctgaatattccttttatggtgtcaggaactctgtcgccgagtgtgcccagctcgcagtgtcaaaggtaggtcgcttgtcgccatcttcactcttctttcgtcacctgctgacaccagtccgccgccttcactcgcaggcgatcatgttcgccgtttacaacgctgcagagggggcgcccccatcgtatacttgttggggtgccgacaatcacattggcaccagcagagtccagtgcgaacccaacgtccgtttcagaataagggtcttcttccacccgcccgccgcgcaggcctcgggcctgagccgccgtcgcttggctaaaccggacgccgttccgacgctctgcccgtcgggcctgacggcctgcaagattctcaactcggctgacggctacgaggtgcgctgctggtcgctcttgtggctctggtcgccacgctctaatcgtcctctctctttcctcgcgcagtgtatcgacacactgagcgagctcgagtcgtgcggcggctgccgctacggcgttcaggcggcctcggtctcgctcagggccaatcgcaggctccggtcgttgtgcgtcgctgcccgtcctgcgcgccgaaggtctaccgtcagcgaggactgatcgccttcgtcttcctctcctgcagcgcgaacatcgacgggacctcgtcgcatcagcccgtcgcacccatcgtcgaggaggcgtcggtcggcgtcgagtgagtcccacccgctccgtactcggcccgggacgtcgccctcaacgctctgacgactctttccttctctgctacagctgctccgaacggcggcatttcggcccgggcctgacgtgcaccaaaggcgcctgcgtcccctacgtctgagggcgtccacctactctcgcttaacggcattagcccgaacgggccgctttcgtctttttccattgctcattggtcctcttgaacctttatccttccctgctcgtttttgctgttgacggttctcatctcaagacacgtcctcctcgcagcacctgcttcgaggcttccgttctcacacaagataggccatctcgaccgtcaggcaaagagcctttccgcgccaccagcgatcagaaaagatcatcaagaggagaacagagggacaaaaggtcgtcgttcattcggaatagcgctacgcgcgcagagtatgtgtgtggtgggcagggttgagctatcgtacagacgggatcaggcagaggggtgagagaggcagagagagagaaagaggtgggggcacgagcgcagtatcatcggatgaaagcgctcgctagaggtggctaaggaagtgcgtcgtggctgacggcaccgacgatcgcgacgccagcagctggacgcttagtcgatcgtcgacgccagccgtcgagagtcgagctgtcggcggatccaagccgacttggtcaacgatcggccgccagtcgtcgccgcggcttcagaggtcaaaagccgacgaccgccagccctcctggccagcctcctcgcgagccttcttgtcgaccttgaggccgagccggcgggcctcgcgctcggcgtcgaccttggcttggtcggccccaatcttgccgcgctcaagcgcctccgaggccgagccggcaaacgacgtcgcctggcggagtacgttgtcgcgctgctggcccttggggctttgggccttgcccgggaagatctgctcgtcggcgccgatcgcgagcaggtagtcgccccgccggccgtacttgacgatgcccttctgagtgagcttggcggtcgacgacgagccaaagagcgaggtcgagaagacggcggtgaggaagtccttgggcgacggcttggcgttggcggctgcgatcgcccggttctggaggccgtagagagcgaggtcggcctgcttgaggtagtcgacaatcgcatgctcgagcgactccttgagggcgcgcttgatcaggccagagacgaacggcttcgagaagtaaaggagccatgacgagttcttcgagatgtggtactggaggtccgagactgcgaggaggggaaaaggtcagcgcaaagcgacaggacgagctggggtcgaacgaaaactgactgtcgaccgtgacatccttgacgacaaagaacgactcgcggttctcctcggtcgcattctcgagtgtaacgtcgaacgcaatgcccttgcggtcaaagctgatctcgagcaggccctcgtcctcgaaggcggtgaggaagccgcccttcttgttgaaccagtaggcaatctccttggcgtggagccggaggccgtcgacgtggagccggaccgaggcgtcgtagtcggccgcgtaggcggcaaagccctgagtaaggagcaggtcgttgtggttgacgatccggatgttgtccgggatgaatgagaccgattcgagcgtggcctgagggaggggggaataaggaagaaaagtcagccgtctcgaccaacgattgagcaagctcgccaggacgcacgtcgtcaatcgcaaagtcgaccgccgacgactggtactcggtccgcgggatcgggatctccttaacgaggccaacgagccgggggaggacgacgtcgacgaggtcgcggccgaggccgagcgagccggcccggagggcgttgaggcccgtcttgccggcgtgctcgagctcgatcgacagctcctcaagcgcgtcgccgagctcgaggaagctctcgtcctcgccaatcgcgctcgaaaaggccgtgagctggtcgacaaactgccggaggtcctgctcgtaccgctcgttgtgggcgatcaggtcctggccccgctggaggagggccgacgaccgccggtaggcccgctgcgaggtcgcgtagcccttgaccttgagcgaggcctcgatgaatgagccgacgtctgcgagagcaaagagtggggtcagatcagctcgcattcaccgttcaggaaagcaagcagcggcggacccttgaagtactgcgagacggcgtcgtcagacttgacgtcctccttgagcgtgttggcggcatcgagcgtcgggtcgagcgactcgccgtcggcaaaggcctcgaggatctccttggcctcgccgagagccttgtcaagcggctcctgctgcaagtcggaagaaaatggttgaatgtcagcacggtcaccggcaatcaagggcaaaataagagaggagacggacgtcggcctcctcggcaacctggtccttggcccgctcggcaatctccttggccttgccggcgtacttcttgacgatcgagaggatcgtgtcgaccgccttctggtactcctgtcaggcgaaagaggcggagcgcgtcagcggcagtcgggacgacgacgggcgcagaaaaggcggacggaccggcttgccctggacatcgcgaacgacattgttgagcttgtcaaatagctcgtctttgacgccgtcctcgcccgagaccttgtcctcaaagtactctgcgagctgctcaacttggattagagcgctctcgcgggcctcgccctggatgcggcccgagatgagaccccgggcggcgcgcttgcccttggccttggtcgcgtcaatgtcgatcggcttcttctgaaggttgggaaagaaaggaagagtgtcagctggtactagagtcatcagagaagcgatggcagggacgcacgtcatcgccggtctcgcgggccttgccctcgatctcgctcgccttctcggcgaccttgccgctggcgtcggcaacaatgccggcaaagaggctgacgccctggttgaggacgagccggaactgagagctcgtcacaaacaggacggcaatctccttgagcgacgagaggagctcagccgaatcctgagcgaggtcctttgcgagcgcggcctgctcgcgacgcgagacgagcgacgcagcggcagaagagccagggaggagcgacgactttgaggccggcgtcgggaccgacacctgcgagaggtggtagaggaaattttggatcttgtcgtcgcctatggtaagggaggaagagggtgagatgggctgtgtcagtcgagcctccaacgttatcgcggatcgcaaaacgaggccatcttcccgatcgtcgctattttgctagcctgaaaaggactgaccgttcttggcctcgccgagatggatggaggcctccatcaccttgcggatcgcacggacgacgcgggcgccctcctcgctgagccggccggtccggctcccgccgcggccgatgccggggctgaggacgtcgctgtcgagcgcggccttgagcagcttgtcgagctggtcctgcgagggcagcttgccggccttgagggcggccatggctggcgcgagcttgaaggcctgctgcttggcctgggcggcggcatcgccggcagccgaagcgacctggcgctcggtctgcgagtggcggccgtcgtgggtgggaaggagcggggagcgctcagaagacatggtgaaggactgggtgtgtggacggttgggtaagagacggagagccgtatcgatacagtgagtagagaggggaagcgagacgggatggtggttgagagggaagaggtaggaagacaagcgaggaaggcgagatggcctgctcccgggtgtcgacgtacgtcatggacgcgcaggcgacgacgcggtgggcgcgcgggctgagctcacctcagccccggagcgtccgatccgccctgcttgtcgactgcaatgcaccgacaacgacgacttctctctcgaccccttctccgcaccatcatgaccgccagcagcagcatcacgcatgacgcccttctagctcgcgcccgccgcgtccgtccgcgctcgtcgttgcccgggatgctgcctcgtaggctgacctgcactcccttcgccggcagttcgttccgccattgtcggccgagctgcacaagggccaggccggtgcgtccttcgtggcctttctccctcatgaagcaagagctggaagacaagcgatctgggcaggccgggcgagctcgaccaggtgcaggccgtcgtccatcgccctggtcgactggctttgaccttgctcacctccgccggctctcctcacgagcccctcacgcctacctggtcacacagctgacgctcatccttaccaacaggccgcattggcatcgtcggtggctcggccgactactctggcgcgcccttctttgcctcgatggcctcgctccgggccggggccgacctcgcccacgtcttctgcacgcccgacgccggccaggtcatcaagtcgtactcgcccgacctcatcgtccacactgtcttccggccgccttcctcatcgtcgtcgtcgtcgaaagaggacgacggcctcccgtccgaggccgagctcgaaaagcaattcggccgcctgcacgcgctcgtcattggcccgggcctcggccgggacgactttatgcaaactgccggcaagcgcgcgctcaaggttgcgcgcaagctcggcctctgggtcgtccttgatgcagagtaagtcacgtcggttgtcagagcactgctctcggaccggcaccttcgcgccgagaactgaccgactacgtcctcttttgcgggtgacagtggcctctacgccgtcacccaggacccgtcgatcgtcgaaggctacgagcgcgccgttctgacgcccaacgtgatggagttcaggtatctctgcgagaagaaggtgcgtgctcgagcttgcccttccgccgagaggctctcccgactaacagcgcgcttcgctcgtcgtcgggatgcagggcatcaacccaaaatcgaccaacgcaagagagctctgtcccgcgctcgcaaaggccctcggccacgtcaccgtcgtccagaagggcgcgaccgacctcatctcgaacggccggccgctgacgttttcgctgcccggctccggggacgaaaaggagcagacgacgctcgagtgtaaagaggagggcgggctgaagaggtgtggcgggcagggcgacgtgcttagcgggacgacggggctgatgcttgcttgggccgggctctggtccgagggcacgtacgagtgcgtctttccgacccacttatcgaccgcgcccgcccttcattatcaatactgacgctgtccttcctccctggcaactcgcagcggggtgacgccgacccctccctcgccaaacgaagaccgcgcgtcgctcccgctcctctcatcctacgtcgcctgcaccggcacgcgcgccgcttcgcgcgcggcatttggcaagcataagcgcgggatgcagacgaccgaggtgctggctgaggtcggaccggcgtttgagagcgtgctcgatggaccggcggcgtagagtcgcagccagattgacccggccggcgaggccttttcgttgcccggcgacaactcgctgaggacgaacgtccctcgtgcacatcactgtatcaaaggactctgctcaacttcttgcttccgatgccgacagggctttgcaggagcagagcggctcctagacggctgccctcatccctgctttcctgcccattcgctcgagactggattgctcgtcgccgttcggctccgggttgcagactgctgcgcgctgtcaggccgctccctccgcatgccccttgttctctgctctgccggcggcctgccagcgaacgaccacagcaacgaactacctcgagtgacaaggtagatcaagcagcaagcagacgtcagtccgaccctctcggcgtctcctgcctcccaaggatcgacgccgcccaagctgaccctccccgctcgatctggctccgccgccgcaccctcctgctcgcccttagcgctccgtcgccaccctcccgtccccgacgccgtccaggaacaccacgagaagcaactcgtagcaggctggtctctcccctcctacattcttcccgctgatgagccgcgcggctctcgtgagggcctcaacgcggccggtctcagcttaaaagagagcccgtctctgaccccggctccccttcgcatcagctccacccaacccacgccttgaaccccgcatctccccttcaggcaagacgctacccccgcttctctcagcagcaggaccgtccgacgttcccgagggtgcagcacgcctcgccaatagagacgtcgcaagacgatgctcctgtcgccgctgcatcggccgctcagccctctgcgctctccgcagcaacacccggccgacgcccgcacgcctccctccacaaccgccgctgtcgcctcctccagcacgccaacgagccccaccatcagcagcaggcgctccaagaagcggcctttggacccgtccgcctggctcgtcgggctcgacggcagcacgcggcccgcgctctctgcgtctcgcgaggcggacaaggcgcctcacgtgctcgctcataggcgaccctacccctcggcgtcctttgccctcgttgcttccggccatgctggtggtgatggcgaagaagcgatgcggcagcagcagcagcagcagctctggcagcacgcttgtcggcagccgtcaacgccgctgcacgccatggcggcgacgctcggccttccgacggtcgttgtccttgaccccaacggcgggcgactctcagtcggagaggacgacctagccgatgatcgagagctgatggacgaggacgatgccgccgtagatcctcatcaacaacaccttttgatcggacggcgggatctttcggcctctcgaagtttgtcgacccaagtttgctgctgggcaggcgacggagaatccgccacagatctacgctgctcggtccagcccgacacgagcgggcaggtcaagaacggcagcaccagcggcatcaaccgggccgcaagtcggccgtcgcggggcagcaccaataacaagcgctcccggtcgccgtcgcccacgctctcgggctcgactcctcggacccaccgctttcggtggtcaggcagcagcagcagtcggacgactccaccaactaacagtaacggcgatctcttgcagacacgcccgccgacagcgatcttcctcccgacatgcaccacggcctcccctctcaaggccgacctcgggcaccccttcccctcgcccctggtggacgacggcgacgacgacgtcgagatgaccctccctccggacgatccgagaggcggccgtagcaaatccttcggcttcggtggtcgggccggctcacaccacgaccagggcgagcctgtcggagcccacacatccgtcggctggcaccggcggcggacgacgacggcagcggcgacagctcccgtcaaagctgtccgccgccttacagacgaggacgaccagatggccgacgagccggacccgatcgcaaccggctcctctgatccgccgccgccaacgctctcctcctcgttccctcgtgcctcgagtcgactccagagtctctcgcacgggctcgctgctcttcggaccgatcggccatcggcaggatcgtcgtcgtcgtcgtcgtcagccggagtaggcgacttcgacggccaaaacgtcagtgacagcgccctgtcgcccttccccctgacaccgggcctctacgagcctggcacgcggggccgcgagcgcatggccgcgctcatgggtctcctaccctcgccgccctccggccagtggagaggctcgacgcccatgcagggcctcgcgacgacaaaccaggttgagaaccggacgctcgactcgcccttccgcagacggcgtgcagccgtcgactctacctcgcacggcggccagctacagcagcagtacactggcgattgctcatacgagccaccgctctctcggtcgctgccgacgacgaggacgatgccagcgcacaggagctcagatctagaggctcaactcgacggcaatacccctgctggccttcgctcgatcttgacggcgacgcagcaaccgcttcagcaacatcctaacggccggttcatcgtcgactatctcggtccgcgcgacgagcagccgtggtaggctctatcccccaccccgcggccgctctgcggacgacctctaccgaaaccacgcacacggctcgcactcatccactctgcgcaccgtctcgctcgtaatgcattgcacacgcgccacccctcgctctccatcactgtctcggcttctcccttgtgcctgcatcgaccgtgccgcttcttgcagataccccattcctatcccgtcacccttataccctttctccttgcccttctcatggctgccctcaacggacgcgtcgcgctcaaacggtggtcatcgataggcgcccgagctcgaacggctcggatcgtcagaaggggtatcagagagagaaggtgtccgcgccacatcaggcggccgtctgctgggtggcggccgttcgctcgcgggaggcgaggtcgccgacggcgtcgagcagacggtcaagctccttgtcaaagtcgtcgagccggccctggagctcgacgagcccgcgcttgccctcccagccgggcccaccgttggcgagcggctcgccaaagagtagaaggtcgacggcgtccggtttgacggccgctggaaggccgcccgcggtcgctactgacgacttgcgctgggcgtccgtgacaccggcgtggtgcgccctagcgcggatgacggcgagcagcgatgagacgccaaaatcgtcgcgcgtgacgaccggcccgctcgtccggccactggcggcgccacgctgctcggctcgactgctgtcgccgcgcgagacgcttgtcagcggcgtcgccggacctggcggcgtctggcgtgacgagtctgcatgggttgtcgccgtcgccggtgtgtacgaccgcccgccgccgagcacagacgcttccggcgtcgaccgtgaccggtacgacgtcgacgacagcgaccggttgattgtcgccaccggtgagtatgcatcgtcaaaggcggtgacccccggctgctggcgggatgccgctctcgactgctggggtgtcgcctgttcgcgcgaagccgaatcggtcccgcgagtgaccgtctgttcgctgccgctgctgccgaggtgtgagtttgctccctcaggccccgagagcgattgtgttgacgaggtacgcgaggcctctgatgacgcagagagccggcgcgagcggtccttggcggcctggaggctgttgcgccggtagaggccgacgccgtctgggtcgagcgatgcgctcagccgtgaccggcggcgcggtgccgagcccgttggcgtctcgcgcaaggccgccttgcgcaggatgaagacgggatcgaaggcgccgaggtcctcgacccgagcctctggaatctcgcgcgatcttcggcgcgaggcggcgtcggttgggccaggcagtgcgcggaagacaggcggggtgtcgtagacgtcgagcagcttcgtcgagggctgcagcaagcgctctgcgaggtcaaagttgacttgataggtcagcgtgtgacggcaactgcaagcgcaaggatgtcgccgctgtgtaccttcgctgccgacgcggacggcaaggccatagcggacgcgcgtgatgctcttccgattcgaaagtttgtcctcgacgatgtcgccgccgtcgacgacgccctctgcgataccgaaccgatcgagactcgtctcgattgcctcggcgaccgtcgtattggcaggaagaaggaacagccgccggcgctcggtctggctcaggctcggtgagctcagcggaacagaagcgactggcggcgccatttgagtcgatcgccggcgggcggcgacgagcgcttcggacgacgggtcaaagctcatgccgtccgggagatcgcccggctggacgacgatctggagcgtgaagcgcccggctgcagcctgattcgagtacggcgacagcggttccttggcaagcgcgtcgaccgcgggcgcgcgcggggatatcgtcgtcgactcgggcgctgactgaccgaggttgcggtggatgtagagcttgacgaccgagtcgtcactccagtcgccaagccggctgattgccggatgcagcgtcaggttggacgctaccgagtcgatcgatccaatcgaggtctggcgaacgaggggcgcgtggacagcatcgtcccgcgtcattgcattgaagacgacgagtgggtgaccctcgaggccgaggaccgtctcgtcgccgtcaaagcctttgacagtgagcgagtactcttgcagggcctcgtcccggccgagaccgaggccgaagcgctgcattgcctgccggagcagctcggccgtcgttgtcgtgtccttgagcaggacagtcttgaacgtcgcgtccgattcgatggcctcgccggcaaagacgcgaaggacggcaaacgagcccgaggctccgcccgctgcggccggctcggccttttggccaggactaaggttggagttcgagataagtaagcttgccggccggttgctctggatcgaggcacgcgcgatgcggttcgcggccgaagattgcgcaaccgtcgctgccgcctgggtgccgtacgaaagtgacgccggggcgacctcagccgaggcgcgcgaagtcgtctgcgtcaggtagcgttggtaggcggcttgaaccttctgatcctgctgctgaagccgcagcgcatgaggcgaaacggaggggctggccggcccggcaagctgtccgacgaccggcggcggcgaactgaacgagtgcttggggtgctcgtctgacgaagtggaagagcccggccgggctccgaccggcgagctagagacggcactctggggccggttgctcgactcctcgtctgacgaccgagcattcgattcgccgtccggcccgccgcccggtgaccggctgccgcgcttgtcgctctttttcttgaacagactgccaaagacgccggccgccttcttcttgcccttgtcatcgtcgctgtcgcttcgccgcatcttctttggctggccgggcaggtggcgatccaacgagtccttgcggcccgagtcgagcgagtcgccgccgtccgaccggagcgacgacgagctgaagttgcgcggcatcgcggccggcggctcgtcgacctcaaaggcctcgccggtcataaagctttggagcggggcgcgacgggcgaccggaggcgtcgcggagattcggcgagtctcctccgggtgttcgagcgcctgatcgagcagctgctcgcgcgcatagctcgagagcgattgctgtgaggatgccgtgtaagccgcgtccccgtaaggcgagacatggttgccgaggtcggacgaggggccgacgggcgaggccgcgcggctgaattgctcggaaggcagcaagatgcgagtcggctcgcctgcggcttggaaaggggaggccaaggaggcgttcggggcggtcggcgccgggctcggcgcgccgatggtcgactgaccgatcgaagtgtccgatgccagcgactggtccgaccggcgcgactgcgacgactggtttgagtggtgcgacgagtccgaggcggtgggttgaaggccgtcccagtagttggacgcggcgcttgcgtcaggatcggcgtcggcaaggaggtcgcgcggccggccggcgacggcatcgtcctcccagctcatgccgtcgtccggctccatcatcatgccgtggacgccggcatgttcctcgtagctcgcgccgtcctcgccctgaagcgggccgccttccgagcgaacctcgacgcgccgcgagggctcgccctggtcctcgttcaagtcgtcctccgagtcgtcggcgtcgtcgtgcgggtcgccgcccgactcgaactcgccctcgacctcctcgtcgtcctcggtctcctcctcgcttgaccagtcctcatcactgccagagtgctcgacgtaggtcggctcgccaaactttacgccccgtcggttcgggtccgcctcggccgaagaaatggttgagtgcggccggccgccatggccggcttcgctcggaatgttgcgcagcttgagccggccgaggttcttctcctcggccgtcgaagcagcaatctgcaggaggcagcagaggagtcagtcatatcacttcaagatcagctcgagcgtgcagagagctcgcacctcgacattgcgcatcttgttgagccgggcgagccggtcgttaggcgtctcgatgttctcggctgggatatacccgacctcgtccgccttaagaacgttgacgagccaccagtacgagttggagtcgtcgagcaggaccattgagtcgcccctaacgaccgaggcctgaccgtcgacagtcgcaacgaacgtatggctgcataggagggcacgcgacgaggtaggatccgggtcagctccctgctccgacaagcatggtcggaaggctgcagggcagaagcccgactcacagcgcatacatcacgctgaagtcgatgtctgggtcgatttcgccttcggcctgggagaggagattagaggtcagcgacgaatcaagcgagtgtgctctcgactcgctcaacgagctgcgagccggcggggccgcgggactgactgagctctcgtccgagtacatgtcgtcgtcctcgatctgcatgccgtgctcgtcatggccgccggcagcgtcgacgtcaatgtgcagctcgggcttggacgccatctctgcctgctcgactggctcggcggctccctggcggagggcgagcgactggccgacgcgtttgaagactagcttgggcggcgggctgcagggtcaaaggcaaacagcacggcctgtgcggagcaaagagctcgcgggctggacggctgacgggcggcaaagagagctggcaaggcggtcgggctgaactgagtgcgacgagaagggaggataggcttgagagtcgagccgagcgaggaggcgggttcggctgccgcccttgctttggctgcgactcggcgcgcgcgccttggacgcgcctctcaccatgcagcggcgcgaagacgagcacccgtcagccaagccaaaccgctcgcttcactctcaatctagtacagcgtcattatcaagtatcgtcgtcggtcgtgtatgcctccgaaatgtgccctcttccaggcctcctcgggcggctgcgtccctctcctgcgcgatcgccgactctaagcgtggtagcggtgctcgcggacgacctcagtcaggaagcgctgggcctcctgccgcttcagactcttccagacctgctcagaggggaggagaatgcgtcagggccgatcgaaggtcaggcagagccgacaagggcaacgtacattaaacgttgagatgttctccttgccgagcttcctgtggacgagctcctttgagaagagcgcgttgaccggctcaggctcggtcgacttgcggcgagtgaccttgtcgagcagactcggcttagccggcccgtcctcgtactccttgatgatggccttgacctcgtcggccgtcagctggtggccgttcggactaccttgcgagggcgcgagcgagcggacaaaaagcgcgtcgaggatgaggacgaggtctggcgggagatcaagctgacgggcgtcagccttggacagaagtcaggaagcagcggtcggaaggacccacctgcgatcgccgtcatgattgtccgcgcggagccgggcgcttcccagaggcccgagacccacgagaggccgacagccgagaccatccacttgattggcagaccggtgacgacctcgtagacaaccgactgggccgccttcgttttgagaacctgtaggacggacgaggggggaaagaaagggacgagagtcagccgagcgagcccaagacaatttgaacaatgctggaaggcctcacgtgatcgttgtcccgaaaattgtacacactcatgacgtcctgaggatcggagtaaagcagtcagccttgaggaccgatgcaggatcgcaagcgttgaaaacagacctgctgcagcatgcccatcgcagtgacacccgtcgcaccgccgacgaactgcacaagagcgaggagggagagacagaccgtcagctaccatggctgacatcgtcgaaggcagccgccctcgatgacgcaccgggatgggctgggccgaggcgccaaccgcgacgctgaacatgcgcatgcctaagaaggtcccggtcgaggtcagccagaggccggtctgcaaagcgcaagtcggtggaccagaccttttgcgatcgccgtcgcaatcttctcgtccctgctgacccgctgagcagcgacccagacgagccgcttcagcacgcgctcctcatcgaccgtcgacgcccccgccgcgtctgacgccgccatcttgcgactcgcgcccttcccgccggcaggagcagcgtacatccgctcggtcgcttcgctgacgcgcgagatctcggccgcgccccgcgagggcgcaaagtggacgatcgcctgcgggagaccttggtgccggagggcgatcgagatggacgttgccgtctcctcgggaagaggcgtcgccgacgggacgagcaggagagtttcgactttcgccagggaagaaatttgtcagtctctccgaggcatgcagcaagaacgattgttcccagggctcaccggggaagtcgaggtcccgcgcggggaccggcagctcaaacaagtcgttcgggcgggacggggaatgcggcaggacgacccagacgccgtggatccggtccgtcagcggccgatgctcgagggactggacgagctcgcgtgcggagctggtcgaggcgagcagcgtgacggcaatgcggttgttgagcggcgaggtcagggcccggccggaggtgacgtcgttgagctgcgcgcgcgggagaccaggacaggaggacgtgcgagcggccgcgggggagggggtcagtctctgcacctgctcgccacgtccttgcaccgagaggagcgagtgcgagagctcaccagctcggccgcgctgatgtcgatgccgaagagcgtgtcgagcaggcgcttgaggccggcaatctggtccttcgtcggcggggcgagaagaactagcaggaggcggaacgtcggcagggctgctagctcgcgctgagtcggcgtcaagttgacgggaggagcggtaggtacgggcaacttggtgggcatggcgcgtctgtaaatgagaagaagtcgtgggtgggcggtgagagagagggatgggcgacgacaggcgatgagatggcttctggtcggagggagggcgaggcggtgtatgcacggcgtctggcgtgggaaccccctcccctccgaaagccagcaggtcgaccgcctgctgcttctcttctcgcctgctttccttctcgcactgtacacgactcaggagagacatgcagcatgttccgggctgggccgaaggagggccggcctcgaggcactcgaacagcctttcatcaacattcggccgaacaacgcccgcaaactggaatcttccccctgtcgacgtgagcttgacttccaccgctatgacagaagcagacagctcacgcgaggcaggtcggagatgaagggcaaagacatggacatgggcagcgggacgcagggtagggcgaaagtcctgagacgacagcgagcagcggggcggggtcagtctctgcgagcgcgaagggcaagcgaaaaaggcaggggagaaggaagggagggaatcattgccgaaagtttaactcttttctcaaaccaccccaaacggcccaaaacgccgcgcctgccaaaccaggaacccgagcccagaaggcccgggccgcctccacactgaccctccaacccctcgtgcccagagtccgcgaaagcgcgcgcgaggacgccgaccttggaccgtcgccgaccgagacgaagcgggagggggccttcggcaaaagtccacgagaggggtacgccagcgagggaacagagaaggaggggaagagaggcgatagccgaagcccacctcccgctgcctcacagctccgcagcacactcgccaatgatcctccgtatcctccgccttaggtccttctcccgaacgacaagccgacgacaaccaaagtggacggtttccccacacggtcacgagcccaaaagccagaagggtatgagcaggaaggacgccacccacccaccggcttagaccggcagacgagaggagaggaaaggacgtgggacgacaagcgcaggcgacacacaacctaggcagacacaaaacgcgctgcccgggcgaattaccaacaggagtgggcgccccgaagggaccgctcccgtctgtgaggggccgaggagggcgagaagaactcgtggaatggattatcgcgttgtaatcatgtaaaacgagggtgtggtggtgaagggggtgaagcagagaaggaactgactttgcgcagagtggtcgagtgcttgctgtcacgaggcgacgagatgatggcaagaagtctttagatcggcaagagaggcgcacgagagcaggtcagcaagggtccgcaaggtgagagagggtcgtgtgtaggaaagtggggtgagggcaggaatcagagtgtttttggtatggggtatcctcaaattattgcttgcggaagcagaactgaataagttatttctcatcatctagcggcagcgagggcagacgaggagccggcatgcgccaggtcgtcgccctgtaccgtagaggggcggttgggcaggatggagggaagcgatagggaacggatgcgtacctggcgggccgaggcattggggcgggcccgactggtctgcgggctaggtctggagcaacggcagaagggagatgcaggtcagtaaggttgatcaacagggcaggcgagaggtcaagtaggagaagtgtctagcggaggtgaaggtcagttggtgatgcatgttgcgatcgctcacgagatcacggttcgctatattggataggttttcatcaagccagggggatggggtggtaggttgaggtgggaggttgaatgagacgactaaccagttgaaaggggagcgagacaggcgaggtcaaaggtgtcgaggtcttgaagggaagagcgaagggcggacgggtcagttttcgaaccagagaacgaatcgggtcgggcgggcgaaagaggttgtcgagaagtggtggttggggagagccctcagtcgaagaaattcgtgctcttcaaggtgttgccaccattaaagatatatgctctgcgaggaagagagaaggtcgaggtcagccaagggagctcgaggagcaggaaggtcggagaaacggggtactcactgtcaaagaatttaaatcatctccgggcaggtgatgggggcatggtgcagcgcaaaccgttacacaaggcaagagagaaggagcaggaactgaccagcatcacaagggcagcatcgttggcgctagtaggggtcggtggtagaggtcgaaacagagacaacatgtcggctgccttgcctcaagattccggcgcgtccgagcggtgcagcggccgacgccaccctcgtgcccaggcgcactctcgctcgcccgctcgccgtcatcgcctaacctcttgagacccgacagcaacccctcaactcaagatgcctgaccgtctgcacgtcctgctcgtgcgtctctcgctccgctatccgcccgaaagacctggcgctgacttgccttgctctcgctcgttagacgacctacaacctcggcctgcgcggcaccgagctgacaatccaggtccggctcgactgctgcgtgcgagatcagggccgaaagctgacacctggaccctccggaccgacgctacaggagctcaaagcctggctgacaccctcgctcgatgcgttccacgcgttggccgacctgcccgacctcgtcgccgtcagcctccaggagattgccgacctgcacctcgccctcgccggcctgacggacccgctgcttcagtcgctcgcacttaagatctcatccgtcctgagcgcccatgccgacgtgctactcgctcgatcaaacgttgccggagccttggccgccgcatccgaggctgaacttcagaaagcgccgccaaaggagtcgtaccggctcgtgagcacggcgagccagattaacgtcggcctcttcctctttgcccgcgtccgcacgctcggccggcgggaagaggccggcgagaagggtcgcgtcaccggcagccgggtggcgagggtcgcactcggcccgccagctggcctgctcagcaacaagggcgcggccgccgttcggctctgggtcgagcgcgggccggctgcagatgagactcgcaccgagagcttgacgtgcgtcccatccacggctaccttggtgaaaccaacttcagggctgaccatcgctctctgcttgcttgctcagcttcgtcgcctgccacctgacggcgcacgagcacaacctcgactcgcggatcgccgactacgagcgcctgacgtcgaacctcctgctgccggcttcgccgcacgccgcacctgggacgcccaagacgcagatcaaccagtcgacgcacgctttcctctttggcgacctgaacttccgcctcgcgccgccctccgacctgaagggcaagggggcgctcggcccggcgctcgagcgctgcgcggccgagggcgactggtcgagcctggtcgcttacgaccagctgctcaaggtccggtctgagggccgggcggcgggcggctgggaggaagccccgctcggtggctttgcgccgacgtacaagctccggccgaacgggaaagagggcgagtacacctggaagcggacgccgtcctggaccgaccgcatcctctactcgtcggcggccaacccaaccacggcgcctgacgaggagggccggcttcagctccacgcttacaagccgccgttcagtgagacgcagtgctccgaccacctgcccgtctcgctcctcgtctcgcttccggtcgtccgctcagtgaccgcggccgacgcagcgcgaccgatccaggtcggcccgccggccgctgagagccaactcgagcgcgaggcctggctcggctggacgctcgaccgcacctcaggctatggctgggccttccttctctccgccgggttcggctacggcgagaaggccggcgtcgccgtgctcgtcgtcctccttggcgtcatctgggtccttgccggcctctagacgcacgctcgccctcctttcgttttcctcccatcttgtattttgtgacgcctttgacgatagagagatggcccctctcggaccgtcgatgcttcctctgcgtgctgacggcttcgtgctgactgactcaagtggcgcggccacgagtcttgacctgtcgagtcggttcggcctggcgagaaggagctcgcctttgtttttcacttctgcagccctcgccctcgactctgaccaccgagaagtccttctagcagcccgacagctatgtccgactccgagcttgccatacctcgcccaagggccgctcggctgcagtcgcccccgccgcgcgtgacgacctcgacgcccgactcgattgtccgcctcctgtcggacctccgcctcgagccgctggatccagacctcttcgacgggccggtccctgacggccttccggtcgcatcggctgcctcatctgcggagatcctcgactcggccgtcagcgaaggcgacgcgactgcctctagccttcacgtctctgccgccggcagctcgagtagacccgacgtcgcatcctcgccgtcccttttttccagtgcgctcgacgtcggcagcagcggcaagggcagccgggctcgcttcgacttcccgacatcgctaacaaaggcctagcagctgctcgaacttcatgcgcacttaaaccttgtcgactgtatgcagctccgcaaggagttgcgcgtcgccctttgaaccgaaagagtgtcagtgcatccgggccgagttcaaggcgctcaacctagcttcgaggaaggcgcatcgccaattcatctcgaactctgccgagtagtggaggagacctctgactgacctacctcctacttcagggacgtctcgtcgactggcaaaattgtcccgcgcaaagttgcgaagaaggcctggctcaaccctctcctgaccaccctctgagggcaaattctcctgcccaccggaacacctctcgctgctcacctgccgagaccatgcaccgtcacgtctcgctcgcactcacgctcttttggagcagagatctgggtcaggtggtctgtcttgcgggcagcgacagtcatcgccagtgcgaggggaggcgactgctgcgcgccgcccgacccctttgattgagcttcacgccttctcttttcgacctcctgccttcccttccctcgtcgaccagcctactatcgcccccagcaagtgcctctcatcgtccagccgtgtccgaccgctcgacatttagttccgaggacgcccgggagcagcgcccaccgtccctcgtcgacgcgtcgacgcccgagtcgatcgtccgcctcctatccgacctcaagctgcacggcgggccgccgccctcaaaggctccttcggccgcgccctcgtcggcaagtctctcgtctcagccgacctctacgacgacttcctgtggcagaacggcttcgacgctcaacgtcggtcaaggacagcctcttcgaaacccgttcgacgtcgacggcggcccggccgccgcaggcgcctcgaccgggtcgtcgggcgttgcggcgagccgcctgagcgtcggcaccctgtcgaccttccgcaagtggagctcggccagagatgttgacgctcggagcgagagcgacttctcggtcgcatggacgaacgacctcgcgagctcgaccatcgagaggagagcctcttcagagcttcttgctggggtttatggaaactctgctgacgggacctcattcgactcgctagcttcatgaccgacgcaatctcctacatggctgcacccgatcagagcctggtcaagctacagctcgtacgttgtggtcttccccttccctttcaagcctctgattgtgcgccgcactgacctaaccccccgcttgactgatccagtggcagtccctctgcatcgaatttggactctgctcgcttcctccctcagacattgcctttgaccagccaccatcaagcgcttccgactcgtcgagtatcgcgatggtcctgccggtgcagctcaagaaggcccgccagcatgcgccagactcgcagcaccctttcccgacctcgctcacgcaagggaggaagaccctcaaggcgcatgcacacgtcaacatctgcgactacatgaaggagcgggccaagctccggaaggcgagggacgcgaatcaggaggccgtcatccgggagaagatcaagacgctcaactttccgtcggcgaatgcgctcaagaagtgcgtcgctgcaatctgccatccctcgattgctctctctgactctcttgctcatgtgtcatcagatataccctcaacaaccggcgcttccaccatctgagtcagatcaaggcggcgtggctgaaccccctgttgatcaacatgtagactctgggatgtcgtcgcttgaagacactcatgttcgcctgctcgactttgcatgagaggcccgtttattaagatcaagaagagaaacatggcatcgctcgagcatggtctacatttcttggacagcgagcatagcaagcacgtcgtcgtctgtcggccgtgcgaacggatgaccctcgtgctcggcaatgcgccggagggccgagtcggcgagcaagccgccccaggacgtccctccgatgccgccttggcaaggcagtcgcacattcgagtcagatctgagtgacgactaggagagcgcagaacgagatggacgaaccaatgtcggtccccagcccggcgacgtcgcctcccgggatgaccagcggcggcacggcgctataggcctcgaattcccacggccgcggcttgccctgctcctcggcgagtcgcgaggccgcgatgacgttctgcgggatctcgtggtcgatcggccgctggaaaagggtcggctcttcggtgaggagggcgtaaagccgacggacgccgcggtgcgagagggcgtaggcgtgcaaactgagggggaagcgtcaggtccgggaggagtggcagctgcaaaggagaggaacgcgccctaagggagagaaggcgcgacgcaagcccggatgaaaggtcggcttgaaccagcgctcattggaccagatgaagccgacatggacgctgtcccagccgtgctttcggccggcgagtgccctgctcatctcctcccactttgctgccatccttaactcggcgtcgacgtcgtcttcctgccgaagtgagcagcaggtggatgagcgtcagcctcgctcgtcaaacctcgggcaggcttcggtttgacgcaccaaaatgagtacgctctgagcattagagtcgatcgcgtgccgcatcgcctttaggtgcgagagccagcaagcagtcggtccatctgcagatgaaagtgcggacgatagaatcacggccgacgaagacgtgttgcagcggtcgcgaggacgcacgcgggtcgattaaagctgtcttgcggtaggccggcggatagacgagcgccgagatttcgccctcgttgcgacggaggtcgaaagcgagcgactcgtcctcgagcacgcgaagagcctgcgtacgcctgccgacgagcagaggagggtctgtcagccatagcaaggttagggaccacgcagaaggggggggcgcagttcaccaggtgcgaccggtgccgttccagtcggtcgacggagcaaacatctcgaggccgccagccgtctcctcagcctcctgctggtcgttaagaaggcgctcgaggatccatgaaacgaccgtgtgagcagtcgacacggccgagacgtacgtgaagggcaagccgagggcggccgacaacttgttcatgtgcgcccggcggtctgtcgaaggtaggatgatcgacaaggtcagcaagcggctggaggcagactgcgagctctcggagagatgcacctgctcggtgcgggaggttgataacgaggacctcgtcccagagttgcccgccctggctcgccgtcaggccggcgaggtcggcccgctggaggtcggcacggagcgagctggcagaggcggccgaacccaagccgttgctgctgagcgtggtgccagtcgagatgtaggcgagaaagagcagcagagctgctgtcgctagggcggacgggctgagaaggcgacgagcaagggcattcaccatgccggccgaggaggagcagcgaggagcgagggagagggtgatggtggtcagccggaagtggagggagagggtggtccgcgacccttcgctgctataagcctgaaactcttatgagccttcacactcctgtttgtaagtcgaggtgacagtcgcccggccagagagtgagcaagtgaagggtcgaggatgaaagggccggcgacgcgcagcagcccccaatctcgccctgcctgtcgctgccagcacgaacgacagcccccctccgccgacgactgttggagcaagcaggagaaaccgctgctctgagtgtcgccgggcagtctgccttcttccgttcgaggttaggctttgcctgatggcggctccgcttacccggacgtgaagtgcgcgcgcggccaactctctcaacccaacgacctcccacaccagccctgaacagcgacggggcagagatagcggcgaagatgccatgatcaggcagccgtgaaagtcaggtgcgaagcaagaaaggggatgtgtggggaggatcgtgaagagtgtaaggggtgtgagactctctctataaggggcgtagcgtaggggaagggagggtgaagggtacaaagacgaagcaaaacgaggaaggcggatagtgcctccagcgtttagagctcctcgtcggtgaaaacctcctctccgcgcttgcgccgggcgatccggtccttcttggccttgcggagctcggcggccgacttcttggcaaccttctggaccttggcaatcttgttgcccatcgagtcaaactggtcctcctcctcgccgtcggccttcttgtcgatccgggcaccagtaccctggccctcgacccagttgtggccggaggcctcgaggtggccgtcgcgcatagcccagacctcagagcagatcgactcggagaactcgcggttgtgcgtgatgacaaggacaccaccctcgaagtccttgagggcctcgatgagggcagcgagcgactcgcggtcgaggtagttggtcggctcgtcgagcatgatgatgtggggccggcgccaggtggcggcaccgaggacgaccttgaccttctggccacccgagagaccgcgcatggtgttgtgcgaggtgaactcggcctcgaggccgaagtcctcgaagtgcttctcgatctccttgcggacaagagggcgcatgagaccgaggcgctgggcctcacgggtgtcgagctcgaggaccttcttctcgaagccgcgagtgatgagctcgtcacgcgacatccagatctgaaatgaggaagaaggcgggcgaggtggtcagcgactggacggcgcggcatgcagagactggagagggacgcacgttctcggacgaagacatgcccttgaacgagatctcgtactcgtacgactgcttgagcttcttgcgcgagaggagctcgtcaatcaggcgcttggcaccctcgacgacgacaactccgccctccttcatcttctgctgctcctcctcggaaaggatccggttggccttgtggagctcctcgaggtcctcgccggtctggtaacgccagaggaggtagtcgagcggcgtcttgtcaaggtgctggtcaatgtggtggaaggcgtgctgggcgacgtagccaatgacgacgttcgggtgcttccagatgtcaccgcccttgttctgctcgaggtcgccaatgaggagcttgacgagcgtcgacttgccggaaccgttggggccgagaatggcgacacgcgacgagagcgagacctggagcgagatgtcgaacagctgctggatcggctgcgacgggtactggtagccgacgtgcttcatcttgatgagcgacttctccttggtcttgacaccgtcgagcagcggcgggttgggcagcttgaacttgtactcatcggcggcggcgagcgagtagtacgacttggcctcggggaccatgcggacgaagtcctcgaggttaccggggtagcgcttgatcttgaagcggttcaggtggatgatgtcggtgacggtccggttgaggaagtccgagtcatgcgagacaatgatcgacgtcgtctgcgagagcgaggtcaggtagtcgatgatccaggtgatgttaacgacgtcgaggtggttcgtcggctcgtcgagcaggaggatgtcggcccggaagaggatggcccgggcgagcgcgagcttcatcttccagccacccgagagcgagccgatcgagtggttctggcggtcggcgacaaagccgacctcggagaggacgtccttaatctcctggtcggaccggaccgagccgatgcggtcgtccgacttgacccagtcaaagatgccgatctcggcctcggagccgtcaatgtcgtgggcgacgtaccacgtccggacgacgtcgggcgaggggaaaccctcgacctggccgttgacgatggcgttcatgagcgtcgacttgccggaaccgttgcggccacagagaccgtagcggtgaccacgcttgagacggagggtggccgtgttgagcaggatcttggcaccgtaggcgagcgagaacgtgcagttgcagaggtcctcaccctcctcttcgtcgtcgaagacgcgggtgtcctggccgacctcggaggcggccttcagcaggtactcggtcgtgaccttctgggcgtccttcgaggcgaacgacaggtaagggacgagcgccgcgtcccacgtcggctggtcaaagttgcgggcgttaacaaggttggcggcgagcttggcagagtactcgacagcctccgaaccgggcatcggagggttgagcttctccttgccgaagatgccgatgatggccgagacggcgttcgaaggctccgtcttgggaagaggcggaaggttcgagccgtccgagtcggcggggatgttgccgaccgagcggagggtcgtgatggcgcggttgacgacgccacgggcctcggggtcggcgacgacctcggcaatcttgataagctgggggagcagtttggggatgaagggccggacagtgtactcgttgtcgacgagcttggccatgttgtcggtgatgacggcaaccttgcgcttggtggcggtcaggcgctcgttgcagccacgcgagagaagggggaccatgagcgagagcgtcggcgagtcgacctccgagacgaaggtggtggccgagagcagctggatggtgccgggaacctcctcgacggggttgatgaggcacttgatgagtgcagggatgaacctagagaaggaaaaggtcagcgtctggcgagacgagcagccagaagggcaggaggacgcacttctcaatgtccttgttggagacgagggcagtggcgttggtcatcgaggccttggcagccttcttgacgtcggccttggtgtcccagatggcgccggcgagaacggggaccatgtcgggcatgagcttggagcacggctcgggcgcaatcttgacgagcttgtcgatgagcgagagcgagccagtcttgacctgccacttgccggcggtctcgacctggttaaggagcgtggggaggatgaggccggtggcccacgggttcatgacctgcacgagctcctggaggaccgaggcggtagccgtcctatagacgagagaaaaggcgctcgcggtcagcgactgatgtgaacgaggacggcaggcgcaggcgaagacgtactggacggtcttagccttgtcggcgtaaccctcaaggagggtagggaagacgccgccagccgagcagtcgacaaaggtcgactcgacggccgggccggcaccctgctcgaggagggtggcgatcgtggcaagagcggcctccttgacggcaacgttcttcttgtcggtgagggcctgaggtggtggtgcgcgcggggaaaaaatggtcagccccggctgctcggcgagcggaagtgaagccttcgccatccgacgagtcgttcctgaaggcaggagacaaccggtgcaaagcgtcggcaggcccgctcgagccgagaagggcacgcaccttgacgagcgcagctccgaggccgatctccttgataaagtcggggccaccgttctttgcctgcgaggcaagagcctgagcgggagcacggtcctctccgaagagagtgctgacatcgaaggacgacatctgcgagcggggagggagggcagggcgacggtcagcaaacgagcaggttgcctggcgaagcagaacgcagagtaggaccgactttatgaaagactggaggaaggaaggtggtggcgaacgggcggagggagagagaagggcaggtcgcggcggcgagtggcaaaaatgggtgacggcggatgacactctcatcagcactcgggtcttccgagtcgaatgcaagggcagcaagagcgcggaactgctcgaggctcttgcatgtcctgccagtcttgctactcacaaggaagggggggagtgatgcctctactgccgtggggaggagtggggatgagggacaagccgcagcccaggccagcgagcccgtcaaaaaacctcgcagcgcgggcggctggccggcagcgcgggcgggcagcgagagagaccagaggcggagtttgaaatttcacctctggcccggagcggctgacccgcctggcctgatcgcagctgcgagttgggcgggcgtacgaccggcccggcccgatcgacagcggtcgaggcctctccgtcggaagtacactttcaaccgttgcttcccagtcaaacatcctgctggtcgaggagacactttgcgctcggcctcaagtgaaagtgtacaagcatgcatccagatgagggcgtctaataccgcgcagcgagatccttgacgcggacgtcagccccgagcagggcgctcatctcgaacgcgagtaaaaggagcagctggccggcgagatcgacgagcgaattcaggatcggcaggcagtaggagctgcgggtgcgtattagggtcagcaagaggttgatgaaggagaggcgaggaggaaggggatgcactctggatccagccctcgggcccagaagaagagtgtcaaccggtcggcgcagacgaggcagagcaagacctgaaggagcgaggacggtcagccattgcgagagagagagagagagagagagcgtaggcggagacggccgcaccgtgatgggcgagacgagcaagaagctcgctatcagctgccactctggccgcatccagcccgtgctcagcacgccgccgacaaagatgagctggatcgggatgctgacgacaaacagcgcggcgccgatcgtccgcggcgacgcccgcccatcgtcgagctcctcgagcgagacttgaggttggccaggaggcggcgacgcgacgtgaaggacagtcgagagcctcgaagcgtagatggagccgacggcgcccgagaggcccgtcatcgagacggcgaggatcgcatagccctcgtaccagccgacgcagcgctcgaggaccatgcccgtcgcgcccgagatggccatcgccgagaggagcggggtccagccctcggtcatcagcggccggacaaaggcgttgcgcgaggtgacaaaggcaaagatgaggccgaagaggacgagaaccggcaggcagaggaacgggattggcgtcgagatgtaggggacgagcatagctccgatgacgccgaggatgaagagcgtgacgaggtccgagaggcacgaagcgatcggcgtcgagatgttatctgccagagggattgcccagtgatagtgctgtcagcgtcaggggtcgcaggaggccgtcgtatgggcgcgcacgcaccagggttgatccgcagccgccggctgaggacgacgaggccgctcatgaagctgccgagaatgccgctgctgaggcttgcggcaaccatgcccgtgacgaggacgatcatgagctccttgccgcccgggggcgtaaagccctccttgaagctgtcgatatagccctcgtcggggtcggcccggccagagaagaatagggtgcggttggtggcggcgagagtcaagttggagagagcgagatcctcgtccgagattcgatgggggagcgtgaggccgaggaggaacgaaaggacacctgccaggaacgagacggccagcgcctgcatctggaggagcgagagctggccgaggatgagcccgcggcgcgcttccctgacgtcgagctcgccaatgttggcctggcagtagaaaagaagacaggctcggtcagcgacatgactaggggaccggactcgctgcggcagaaacgcacgctcgtgctgaggcgggcgccgaggcacatctccaggttacccttgaggttggtcaaagtcgggacgaggatgaagagctcatcgacgcgctcaaagacagtccagcgcgagagatgctcgagcagctcgccggtaaagacgaggccctggagggacaggagatcggtcaggattagcttgcgggcccgagaggggtaaccttctgaggcgcagcgacgcacgattagggtcaggaggagcgtcggagccgtctatggaagaggaagaaggtcagcctccacgaaggcaagtggatagtgcacgctcagtgcgacgcacctcgtagatgatgccaaggatctctttcgtccccgccggcgaaggtcgtcgcatgccgagccagccccctacgccacggccgccgctgatgatggcctcgccgcgctccctccgccgagcgacgctctcgccagccaaaccgtcgctcgagccacctcccccgccggcagcactgtcgtcaagcacgtccatctcgtactgcagtaggccggcatcgtccgcgccgtcgttctcgtgctcgcgcccgccatagtcgcccgagcgctggcgagcactaaggcgaggctgcttcagcgcccgcccgcctcccgcagcgtctgatcctggcggcttgatcttcgcggacgggtacggacccgccgagggaccgtccgagcgcgagacagagaaggccggcaggtcgtcttcgtcgagcgggtcgaacgagctcgcccgccggccatcggcgctcgacggcggtaagctcctcggcggcggcggcggcgagctcgaaaagggcggcggcttaggcccgtcgtcgcgaaaagaaatgatgggagacatcggacggcgcaggtgcgcgtctggagggccagtggagaccagagataggcggtgatgggggcaaggaggcttgaagtaacgaccgggcggcctgagggacggtggtgaggatcgcgtcgggcggccggtctctttcgcgtgacggtcgtctgccttgccgcaacctcgtgtgagcggctccgatggcggaagactagatggccaaggttcgtcctgcagagggcagcactgctactgagagcagatcagggctcgagcttggtgaagggagggcgccggtcggtcgtggtcggtgtcaggtgccgctctcattcagtcgcgcgccttcgtcacgacacgccgcagcgctcggagccgggcgaggaggttctgtcctgcgaacttcaagctagacaatacccagatcatataaacaaaccaggggcagcctcgctcgagatcatccgctcgcatgctgaggagaacgccttgaggcgtcaagaggaaggacgtcgaccggctgctcctcggccggcgacggccgaagactgtcagtcgtcgtcgcccgcagcagcagcagcagcgaggccgcagcaggatctcgtcgtgctgacgagcaggagggaaatctagggacctgttcgtctggccagctacaggccgtctacaagcggccgggtatccgacacggtgaccgcatcattatgggaggtcggtccgaagccgggcccgctgggcggggatagcccggcttcggacgcccgctgggcgggcatgagctcaacatataaggcgaaccgcccatctccttctcacctccaccccttcctccttctcaattcccccgctcatcatggtacgcatgtgctgtcgccttactcctggccaaagtatccttggactgaaacttcctagtccctctctcaacatccatcgtgagcgacccgacagacctcgatcacctcgttcaagctcgccgacagctcaaagcccttgccctggctctcgttcggcaccgtctacgccgagggcacctcgcccgaagagttccttcccgtcggtcgcaaggctgttgaggctggcctacttgccatcgattgtgcgtctccttctgggctcgagatgacgtagggcgctgctgagcaggaaagatctcgccttcccattgaccaggcgcccagctctaccacaccgaaaaggaggtcggtcagatcatccgcgagtcgggccggccccgggaggacttctttctgacgaccaagcttagcaacccggacgagatggatcgtgagtgtcttgtcacgaggatgacgtcctctctggcctgagcaactgaccctcgtccgtctcgaccagccacgcccaactctgagcccatcgccgtgtccgacgtccgtgcctctgtcctcggctcgctcgagcggctcggcactcagcccgacctgctcttcattcacaacccctttgtcgtccccgccggcgagcttaagccgttctggcaggcgctcgagaagatgaaggacgatggcgagttgacagcctcgctcgctgtctccaactggcggatgaaggactacaaggaacttctcgcgttcgctaagtacaagccggtcgtcaatcgtgcgtcccttcctcctcgcccggctcatcgaatgcttgcgctgaccttcctctcgaaccgcagagctcgagtttcacccgttcctcctgacggacctcgacgagattcttgagctccagaagcagcacggcatcgttacgatggcctacggcccgctttcgcctctcctccggcacccgtccaagggcgggccgctcacaccgatcctcgaccggatcagcgtccggctcggcatcgagcccgcgtcggccctcctcctctggttcaaggcaaagggcgtcgtgcctgtgacggcgacgacgaaggctgagcggcttgccggcatgggcgagctcgcccggtccgagaagagcctgacggccgaagacgtcgcagagattgacgccgtcggtcgcaagatccacttccgggcctacgacgagcacatgctgttcgaccacccaaagacggacctgccggtcgacctttgaaaggtctgtctcgtcccgcgcccgatctacccttgcgactgatactcatgcgctcagcctttttttccggcttgcattcttcaggatatgacgggcatccgggagtccatattgatacagggcgatgtacacgaacagggcgagggaggcagaagggagacgtagcaaggcgggcagaacagcagaagggaagcaaggcctcagagggccgtaccgcgctcgaagttggcccggatctccttcgtatacttgtcgtagtagcggttaatcttcttgttgaagaccttgttggcgtcgttgatgtacgtgacgtcgccctcatcctcgtttgcgcgctttcgcgagaaagtcctccgagtgtgggcactgcggaagagggagagggaaggagtcagcatcggcgtacaagtgcagcgcaaaggccgaggggagacgtactccttgttcagtcgctcgatcacctggtcgacagcctcctcgctcggcttatgctcggcaaagctcaggttgttgccgtcggcatagagggtctcgccgtccatcgtcttcatccgctgcatcgccttgctcgttgagacctgcgacgtcagcgtcccgggttcgaggccgagcgcctgctccttctggaggttgtagagagcaaggtcgggcttgtgcgacgccgcctgcttgttatacttggtgtgggctgtgtgtgcctcgtctagacaggggtgggatcggagcggggtcagcagggatcgagccgacggtgactttgcgctcgaggcagggactgaccaacgtagcccaggttgacgccctcggccttctcggcgagcttcttgtcccaccgatcgctgtcctcgatcgagtacgaccagttcttgttgcgctggaggtcttcgcccgtctcctcggcgtcggcctcctcgcgcagcgtctcggccagccgcttcttcttctcgaggtacgcgagctccttggccgacgtctttgccttctggtgctcggcaatcaggtccttccggttcgccgccgtcgacgcgttctgcgtaagacggtgaggatagagctgtcagtccggttctggtgggacggcaggagagggcaaagggacaaaccatcttctgccggagctccttgagcttcgcctgccgctcctccatcgtcactttccgggccgcgccctcggacggctcggaggcggaagtcactggcacctcctccgcctgctcgggctccaactcgggctctggctccggaacagcgttcgccttgcctttgcccttgcccttggcggccgccttcggcttccggccaccgcctccgacgaggtgtgagtcgacgtcgttgccgacgtgcaggccctcgacgacgccctccatcttctcgacaacctcctcggccgtcggaacctcgacatgggcaaaggcctcgaccgcggcctcaacggcatgcgctccatccttgacggcatcgacgacggcgtgcgtcgcctgggcaaggagcgactcgtcggccgaggcggcggcgtcggcgacgacctcctcggcggcagcggcagccttggacgccttggtggcgcgggctttgcgaggaggcatgatttgatggggattcgatgggaatctagaggtctggtgctactggcgaggttcgtgacctggattaaactgggaaggagaaggaggatagaggtgtctggcaggtgggtgttgccgttgaaagagcggcgcgattgcggctgaggtctttggtcggctgccggctgcgattgagctcgctgcctacgtaccacaccttcgcctcggcctccagttctcgatttgcagtcatagcccgacagacatcttgcctgtcatgtcgtccaaggtgtgcgagagcggaaggacatgctcggacgatctgcggctgacgccacctctctcgcgcctccctcggtcgtccgcagcccaagtcgatgaagctttcgttcaagggcgacaagaagtccaagtcgtcctcgaagcggcatcgctcgacctcgccaggtgacgatgcctgcgagagctcgtcaaagcgcaagagtagccggcggcccaaggctgtcgaggaggaacaggagggcggcgagcctggcgactgggtcttccccgagatcgctggcgaggtcactgggccgacgttcatctgggcgccgagcgatccgccgtgctgcatctcggtacgtgtcttcgtacgtcgaagatccagcatggaagctgatcatgcgcggtcttgtctgtctgcagtttgacgcccagcgctcgcgagtcgtccccttcccgctccccgacgcgccggcggccgagtcgtccagctcgacgtctgcgctgccggcgctgcctgccgcgctcacgcacgagccctcggagatcgcccacgtctgggtcgtctcccagctgtcaggttcgacgtcggtcaacctccgggcagcctccggcaagttcctcgcttgcgatcgcttcggtgtcgtgacggccgacagcgagagccgaggaccgcttgagagcttcaacatccacgtcttgggtggtgggagcggcagcattgcgctcgagacgacgtgcgtccatttcaaaactgggacgtctgcgactgagcaagctgacgcgagactgctgttcccgtttgccgcaggcacggcacctacctctcgatctctcccaccgccgcctctggcccgacgctccgaggtgactcgacctcgatcggcttctcagagacattccacgccaaggtccagcgctcgttccgggctaaggcccgggttgctgcgagcgaggcccaggagaagggcggccggcggacgcgcgaagaggacatcgatgaggagcagctgacgaaagatcgcgtctcgtggtttggcaacaagcacgtcaagagttcggagagcaaggccgaggtgcgtcttctcagaaagtgtgcgttgcgatgactcaaggctgatcgatgtcggccattcgcccttggtccggcagctccgcaaggcgcagaaggagggccgtctctctgaggcgctactcgaccggcgtacgaagctcaagaggtgatctagagtctctcatcttcttgcaaggtgacagcgctgaccgcgaggctcttgctttttctcagtgacaagttctgctgagcaacaaggcggcatcggagggatcctctggggcggccctccggcgcattgccgagcacgggggtcatccgttcgcacggtcgaccgacggcgacgtactcgttatgctcgccgttcaggttatgtattgacgctgtcgacggcatgtcacttcttttgtcaaggaccctcgaggtgcctgccttgtgacccttccgttctgctgcgcggcgacgcaaggaccataccaccttcagccctctgcgagcatttcagtggcagatgacctcgtagcgatagcgcagactagcggcttgtgatcgagtcagaatgtccagcagcctgagcctcgtgaagaaggacggaggtcgatgtgccttcacccgcctgcagctgggtcggacgagcagccgctgacgaggcgaccgaccgactttggtcgtcgacaccgaccgcgccttcctcctctcaggcccatcgccctcaatcttcgctcctgtcatgcctgagaggcaccaggcgatggccctgccggccctactgcccaatctgtctgcggccgacagcgacaaaatcgacgaggcactgccgacgtctccctctcagccgccgtctagttcgtccgaccgggacgacgatctcgtcgacaatcggtcgcctcagccctcagcagacgccgacatggtcactgacgatgccgagagcggcgcttcacgaggcgagcaccaccaccatcacccggctgagggcgagctcgagccggcgcaagcaacgtcggccgcatcaccaccacctccatcacgaccgccggacgaccgggcagtgacagctcctcgaaccggagacgggcccttcgttcacccggcccgccctctcgaatcatcagatgttgagatggggacctcgtccggagaggcgcctcggccagcgagtgcgctcaagccaactctagctcggccagtcgagtcttgtgctcaggtcggcgcagcggccgccgcatgtcctgcttcccgaccgagctcgcacgacccatcacatccattcacgctggactcgcaagacgactttccgcctgagggtccgctcagcagcggtctctccagccttcgcgcctcgtcgacgaccaaggttggtctccgacatcaataatggagcggcggcgagacttgaacagctgactgacgttgccgaccgaccgcgcttctctaggactgtctttacccgggctctacgtttatcggtaatcagagttagaagcggagctcttgcttgtgtttcttgcaacctgtgactgacaaccagtctcgctcactgcagagagtggccgcaattcgtataaggtggcgttgcgcttcatggttagttctcgaagccgcgaagttgccttcggcaagtcgctgactgttgcgcccgctcaatgataatgcaggacgttaatctggccgatagcacgtgcacgggttgcctgaccatctgcggcctgacaacggaccgtcccgagtgagtctcgccagtcttactttgagccctcatgatggcggaggctgactgctagcccctctcagactgacgacatacttcgacggcgaaatcgtcgggcctcgctttggcttcctcaccaacaaagtgggtcgactgtcagatgtctgtctcgcgccgggcagcttaggttgacggctgctgcttgttctcgtttcgcagtgggacgcgacgcggagccacgacctcgcacactggcagcgcttcccgctcttccggccaatcttaccttgggtccgcaaaaacgacggctggacgatgccgtcaccgttcgtgacggtgctttcgtccggcagcggcccgccatggtcgtcggaaagcggccatggaccgacggcgccgggagccgccgagtcgacgcggcccccacacgagagcggtctcttcttgcggatcaaggagcggtgcctcctacccgatcatcgcgtcacttcgatcagcggcgcttccttcgagggcttttactacgcgcacgtcgagtttgacccgcccgccgtcgacggtgagggtcactcgcagccagacgtccctcatccgccatccggtcaacagccaggctctacgttgcgcgccaatcgatcacggacgcaacacttgtcatccaacacacacacaaacgccactgccaacgaccgatcctcctttccctcggcgctgccaacgtccacgcgcagccgcctgcctgtcgagccaccaggcctcgcgcggccttcagcgccagcgcaactctcgcctccactggcgacgtccattgaactcgggcgggcaaagttgtccgggttctacttccacgtcgtgagtgcacgaggacggtcgcttgctgagctctcaaacgcagacctgactctgctggtgatctccggcagaaaaactcggagcccttccaggagctctcgctccggcatgttaaggaggacgaccggccgaccttccaattctgctaatcttaacgacgcacccacgtcagcggcgcacgctcgccctatcatcctcacccctttcatcttgccccgctgctcacgacccaatgcccgccacttgtagctcctgcgacctttgtacgacgccctatctacttcttcttctggtgatgctgttgtagaagcctctctgcacgaaggacgcgcggcacccccgtctcgaaagacgagctggggcaagatatcgaaacatggcatcgttatgcgttagaactctgaactcgaccgtcaataaggagcggctgctccagacactactgcccactcggcgttgtatgcctccagccagggcaggccggcctggtcgcggagggtgaggccaagtgcgcgcaccactggggcaagcgcgccgaggcagaccctgtcgcggccggcgcgggtcgaaaaggagatgggcttgtcaaagttgtcttcggagacgatcttgatggagtgcagggccggatagcgatccggatgagcctgaacgcggcgaatgatgccgttgagtgcgacgtcctgagatgagggtggtttggggcagtcgacggcgctaacgcagcgctggttgcacgccactttagcaaggactaggccgatcgtttcgagcgtgctgatgctttgagatccgatcaagttcttgaccgtatgagtagcttccggtgtaaggtacatgtcgaaacgccggagctaacgtaggtcaaaaatggtgggaagggcctcgggccaaagaaccgattcctcccactaggccgccaacgaccaaagcgccggccggaatcgctcttttggctcgctctctgcgcttgctggtggttgccagtctacacagaaccccttgacatgcttgaggttcggcagcaaagcaaatagtggtctgctgtcttgtcatcccatgtcgatcgtcttgacaaggcggccaaggtggggtctgtcgaggatcgacctattggaggaaccgatgtaatggtagagcaggcgttggccctcggcctgaagacgatatggcgggtcagtctctgctgccagagcgagcacaaccggcgtaagaggctcggcacgcaccgcccaggtctttgacacgagacagagctctgttagaaacgcctcggacaaagaagtcgagggcccaccctcctcgtactgggcagtgtggtgtaagacctcatgctgaagctcgaccggcagcttaggcgcttactggcgatgctgggaggccgagaggaagtcgaggggcgcgagcgcagcatccaatcggtcaagccggcgagtctcgggcgagcgagcgagcgaggagcgaacgaaggcgacgtactaggcggagggagcggcgcatggtctctgagaggacggtagagagcttctagatggacgagagggcgagggggcggcagaggacgatgatggttgcacaggaaggcgggctcgaccgctcctcaccggtttttcgccttctaagttgcgctcccttcctctgcttccgtctcctcccctcgtctaactctcaaactcctcgcctcccgtccatagacccgcctttgtcattgcatgcccgttacaccctaaccctaaaagaaccttcaccttcaccactcgagatgggatctctcgaggtgtcgaatatatagcgcgtcaatctacggtttaagaagatctgattatctactcctcctcgtcctccttctgctcgacccgcgggtatcgccaagcctgccatgcgagcgctgctttccccacgaaccagaccaagtcgaccaacccaaggtcaggcatcgtctcccacacaccccaccacccgctgagcacgacaggtaggttgaggagcacggccgaggcgaggtcgagatgggccacgatccggaacgaggcgccgaacctttggagacctctgttgaggatgaactgggaccagaagaggacgacagacgaggcctggacgatcggtcgaaggagagcgaacgcagccggcgaggagggtcgcaaggccgacgacgccgagacgatcgctgggatgagcgggagggcaaaggtggcgaggaaaaaggtgaccgctgcgagctgggtgggaaagttagggagttgaggaggtcaaccagagtttgtacgatcgcaaccatcatacaactgaacgtaccgctgccttcatccaccacggaaacttttcctcctccctcgtactggctcgctcgcccttcgtcgcccgcctccttctaacaccgacaaggaccaagtccttcggtcctcctccgatccactctaggcgcgcgcagagactccaaacaaggcaggacatgagcaacacgaccgggctgatcactcagtctcttttgtttcccttttgtatgacgcccgcgccgaacgcgacgaagcggacgagcgtgtcgattgcatgggcggggaccgcgatgccggtggtgaggacgcgcgagtaccagaagtaggcggtgagggctgttgaggcgaggcctgcgagcccggcgagggatgagaaaagcaggcggaggatcgggcgcgcgccgggtgtgaagctgtggcccatgatggcgcctgtggcacggaagttcaaaggcaggtagggtcagcgcatacatcatttacgccaggaggttgcgcttcggtgcgagaacaagttgatagagacgaggactgactcagaagctctgcctgatcttgccacggaccgctgtcctggcctgccttctcgaagaacgtgtagtcgtctccaaattgttcgaagtcacgactcccatacgtttgatggtacacctcggcctgtgaaggaagagcgacgcaatgtcagtcgaactgtgtctcagggagacaatgcctcacggaccggccaatcggggacactgatacgtaccagagcagccttgacggacgaaatgggcgcgaacgagacgtgccaatcgaactcgaagtcgggctcctcagccacatcggctagaaagcattcaaaaacaggtgaaggttcagcccagtagctcgccttcgacaggaagatggcctaagagcacgccctcacgagattcaagatcctcatccggttcagtgaggttggtgtagtccttaggtccaatcctaccgtagttggagtgcaagaacggcgggtagcggtatccgaccacctcggagggggaggctgtatcgccctcggccagggttgccatctgcatcagctgctcgaagtggccccgattgacgaaggtcctcgtgcacgtctcccagaaccgtttgcctcgatcgcattcttcctacaaatgcgaggtgtgggagaagtcagctttctgatcaagcaaattgagacgatgccactgagacgacaggtgggacttacgtcgatctttttgagcttcctcatctttcgcttgaactttttaagcgaatagaccggtgtctcgttgatgagcgtgaccatcgaccgcttgaccagcattgatctttgcctcggtcggccagactcgttgtcctccctccaggggtccgtctcctccttgaccttgtcctcgttctccgctgcttcgtcgtccgcctcgacatcgtcgccgtcatcattgtcctcgttcaatcgttcttcttgtacgctccaaagagggacgatctgccggacaaggttgattcctttcgagcccgggattcgactctcccacggctggtcgtgctccttttgctcggacgcgttccttccgacggcaggatacggcaacggcatcgtctcacgaagccttccgaatcgaccatatcgatcttcctccttcgaggagccgcggtaatgtgtgacgtttgaggcgaagaacgggagggtcgactccgacggaatcagatggaacgtcgctcgaagctcggtgctgtagtactgggtgcgcagagaccgactggggacgcgatggggggagatgagcagtcagtcattggtcgtacgcaaagccttcggccagcaccgcgaaacgattgagatgaaggactgacatgaccctgccggggagcacaaccttgacgaccttaaaagctgactgggataccttcagccgccgcaggacgggctcgctgaacagtctctgccactctggctcgggcgggggtgtccatccctcgccgtcgtcgccgctgagattgatgacggacccgttccgcgagagcgacgcgctgaccacagccgacgacgtggcccgcgcctcgagtgtcgtcgtcgtcgcattcgtcgcattctgctgtttgtggaacctgggcccgtgatctgtgtagctgtcttccctttccttgagccagacggaggcgacgaggtcgaacctgtccacgccgagctccttctgaggtccaaacaacgccctcacgagctccgtctcggcagcgaccgacccgttcgacaagtggagctgcttcatgtgcgggttccacatcttgcggaacttgttgaccgctggccggccttgggtccatccgtggaaggctgcgaatcccagaaggacgaggagggtcgtagcgaggaccaagcggaggggcgaggacggacgagctcgtcggttccggaggatgggatcttgggaggatgcttcccggtcgagcaaagggatcccgacctgatcgacatcgtcgtcgtcgtcgtagtttggcatcggacgagtgggtgatgagatgaggctggtacaagtttggagttcaaagggcggaggtgattatgggctcccaaggtgacaggttgagctggacagcaagcgcatggggtcctcgcaccaaatccggcaccaccggctgcaacggctacaacaagggcaaacttcaagtcggccccattgcacacaaacccattggactgaatgagctgtgacgaacaacgatgtcgttcaagatcagaggttgaagcagtctggaggaggagcgcgaggtggagctcagtgaccccaaggtcttttccgttgacccgctctcatgttccttaagatagttagcataaatgttctcttgacgatgcgacgctgaagacttcatggtcgttatcctgatctcgttgatggacgtggttgtggtccgatgaattcgcctgtcccctgcttcatcctgtagccccgctcctgcgctccttcctcacatgtccgctcgcactgcactcttgtcagctgcggcaaaaggacattcgccctttgaccccgtttgacggttggctgaggcccgctcaggactgtctgtactcatttccgacctcggacgtgatagtgtatcgcatgccgctgctagtatatccagcagggtctcccgtcgcccctctagagcgaagtctttccctctcgctgtcatttggaggcgatggcgaagatgcagtttgggccgcctgtcgctgcgccgccccgctggtgagcatctcgtttcgtcgacggtcacgacgcctccctctcgacgaccatctcgacctcatcatgcctggcctcctctcaaagctggctttggttggttcgctagctgcgagcttagcccacgcctacactgttcctctcagctcggttgacgtctcggagcaagtgcgtctgcctgcccagcccgagctttcggctgcggcgagctcgccgggtgagctcgcccccttggctgacgaaccttgctctcctccgctcgccttacctgcaaggcctgctccggcatgtggggtccgaagaagggtggcaacaagcctggtatcgagcgtgcgtccctcagaagtctgccggacgaggatcaagctgccgacgcactcgtccttggcgaggacctgagctgcggcacacccgacgaggctcgactgacgccctgatgctctcctctctccgcttctgttcacaatggcctgcccctgctgctgcctggcttacgcgcggctcgatgctttccatcctgcctctcgtgacgttccgctccgcctcccacctcgcacgcgttgcatcgcaaccctcgccccgcagtcagcttcacgcagggccaaggccaggtcgcgctcgtcgtctacgagtggtcggatggtgagcgaggctatcgcctgccgacttggcctcagcctgaccgctgaccctccctctccctcaccgctgaccctccctccccctcaccgcttccttctcgcagtcggctaccttggtgtcgagaacccgagcctcgtgacgggcgacccgcaggactactactacatcccgaagacgtacatctgtgcgtcactgcctctttagccggcttccagtcaagcgtctaaccagtttcctcccgcaggcacgaccgacgccctccgccagtcgctgtgcacgccgaccgagctcggcgagttcatcatccgattcccaaacgccatggaggacggcctgccggcgcccaacaggacggtcgccgacacgagcatctttacgcagggcctccgcttcgttgagtcgactaggagccttgagcgggtggctgcccggcaagcaaagggcgacgaggccgagacgacaaagaccggtagttcgcccgcggcccccgcggccacctctgccgttgctctaccacccgccgagcagactgcggcgcaggacaaggagaacgaggtcgctacatatgcgccggaccagagcgcgccgatccgatacgaggtcgagcggacgggttattactgcgtgcgtcgggcgccattcatctcctcggcacctggccgagtgctgaccgtgcgcccactgcccgcgcctttcaaactaccaggtcggcgtgattcccgtgacgctcttgccttcttcgtcggcggtggtcccggctgagcatgcgtcctttgcgggggaggcgcgcttcatcaacgtctttgacggcgagctcgctgcgggcgagcatccaaaaatcctatggtatctcttcctgacggccgtctacgttgccgccaccgccgcctgggctgcgctatgcttccgctaccgctcagagctgcttcccacccaggtgcggctccttgcacttgaaccccacccagctctgctacaagctgacaggccctcgccccccttccccgcccccgtccagtggtacatcggttacgtgatcgcctacctcgccgtcgagatgtttgtcaccttcgtctactaccgctacttcaacgcgcatggggcctcgaccggcagcacggcctttattgtcgtcgtcagcatccttaatgccggacgcaactcaagctccttcttcctcctgctcgtcgtcgtacgtgcctccaagtccccgtgggcgctctgctcccctcaactcaccagtctcatcgccacccctcctgcaggctatgggtctctcggtcgtcacgccgacgctcggtcccgtcatgcgccgcgttcagcttctcaccgccgcccactttacctttggcgtcatctactcgctcggaacggtctcggtcgagctagagacggccagcctgattggtctactcgccattgtcatgggcttgagcgtcacgctaaccacattcctgatgtggacagctgtctcacgtgagtcggccggcggctctgcttgtgttctcaacgactgacgctgctccctgctccgccagtcaacggcacgatccttcaccttgagaagcgcaagcagcactcgaagcttaagatgttcaagaacctccaccggatcctcatgtttgtctttcgctgctggctgcccgcttaagcgactggcagtggctgatccgctgcacatcaccaggggcgccgtcttcgccgtcggagggttctttatcctgtcgggcatcaccctctctgaccgaggcagcgacgactttgcccctcggtccgtgctctgcgccccttggaaccttccgcagtgccttggctgactcgcttcaaccgctgatcctcagcaactggcaataccgctggttcctactcgacggctccctctcgagcatctacgcttgcgtcttctttagcatcgcctggctctggcggccgaccggccgcaacgtccgattcgccatgagtgaagagctcgcccaagtgagccacgtcgggcctttcaggcaggttaccccaagctgaatcgcactggctgcttctacaggacgaggaagaagccgatgccgaggactacgagttggcccaggcgcatgccggccgtgactcggaggacgacctcgaagccgcccgacctggcctctcgcagcccgacctctcggccgctggcccgccaggatacgacgtgccgtcctctcgcgacgccggtctggcgcgccgccaggagccgcgcgacgaggttgtctttgcgatcgacgacggcgactcggacgatgacgacgacaacgacgacgataaggcggacaagaagcgtcgctttcgggaccgtcaggcggccgacgaggaggaggaaggggacatgggccggcgcgacagtgatgagggcgaggcgctcgtcggtggcggccggtcgagccggcgaggctgagtcgaacactgccgccgaccgaatcgacaacaatacatgcgctttccatctttcccccgccgctcggattgctcgcaaggaagtcgtcatgggtcgtcaaaagagaggaggtggctcagcgccaattcgacgacctgtcccgcatggacccaaagccacccagacgacggccgccagacttgccgccgccgccgccaaagccgtcgccgcctcctgacgcagtaaggaagccgccattgccgcctccgccgcccataagcgggtcatcgttttgtgagggagcgtagaggtaggtgaatttgtcagtgagctgcggagcaaaagaggaggggcagtgggcgtcagtgccggcttgatcgagagaagtccggcgccgacgaacgttattgagcgagagcagcgacttggacagggtggagaggtagctcgtgagctggacgtccgcatactcctgcagcagcagcagcaagccagggtcagcgtcagctcaggcggacacgtgcgacaacctgtaacggaacgacgacggaccgtctcgaattcagcccggaacgcctgacccccttcgactggcaggccggccatcagaccgccgatcatgcgcaagacctcgtcgtcgcgccggagcgagccgtcggcgacgccccggaggtaagcgaggatgagctgcgtgcgcgaggcgagcatctggacggcgttccggagcgtcgtcagagtagggacgactgcggccgggtgtggatgcccgtgtgtcagcggtcgttccccattccatcggtcgaggtggaatccgaagacgcacgggatgactctcctgccgagctagcgccgccaaattgatcctgcgacacgctgctgaccgccacccgctctgcctcaccagattcgatcttccagccgccaacgcgcgcgagccggacgccaccgaggctcgcccctccagcgtcgtgcgccgtctgaaagatccggagcggcaggtcgcgttcctcagacaagggtgcatccggcggtgagggatcaaacacgagcaggagtgaggcgtcgttcttttcgagcatctgcagggtggaggcttcggcttagcgcgagcacaaggggtgggggccgctgcgcgcacgagtcgccagtcacgagcggtcaaggcgatacgcaccgaacgatgaagcgagagctctcgctccccggggtcgccagctccgaccgtgtaccagcctatgaactcgagcgtcgggaagacctgcttgactagcgattcatcacgaagtcagagtggggggaagcttaagcgtcagcgagcggcaaaagcggcgccgactcaggcgacacctcccgcttctgccttctcatgctcactcacacgatgcggtccgctcctcgaagaacgcccaatcgacctcgccctccagagccttgtcagctgcggcacatgaggagccctcgacgtccatcgcgctcgcgtcgtcggcctgcggcggccggacgtaggcgagctcgtacgaagtgacgagctcgatctcgcgtcccttctgaacgcccagcaggccaccgaatacttcaggcgaaagtacgcccatgtcagtccactgatggccgagcacgtcgatgaagaagcaggacggaccaggtgtggtcgcctcaggccggttgagtcgcgtccggccgtggtgctcggcgatgctgaggatcggcaacgggtgcagcgtcacctcgaccgccgaggccgctgatggtgctgccgccgtcgagaggccggccgtaggaggcgccgtcatttgtgacatgctgcgaaagaagaatgggaaggggtcggtcgagttgccggtgtggaggttcagaggagggtccgtgcggcggctcgctgtgagcaagatggcttcaacgtccgacagccatctcgttcagaccttattttcagcagccaagaccgctcttgcaacagctcactgatagggtagccagtttccaactaccgtcccgccgccgttgctcaacagctgccttcgcctttgccgacatggcctcttcgtcctccgcgcccgcctcgccggctccgtcgcacgccctcttcctcgcctcgtcagcctacctcccgaccgccccctcggccgcttcgctcccgaccgaagtcaaactcaggctctacggcctcttcaagctgctctcgacgccgccctccggtggcgacgttagcggcgcgggcggcccgccaaccgcccggccgagcttctggcaggtcgaggcccgcagcaagtgggacgcctgggcggcggcagaaaaagagtttggcagcaagggggaggatggtcggacagatgctaggagagcgtacgtcgagatcgcgcggagtgttggctttgaaggtgcgcaggttgtcatgccggatcaacagcctcctttcggccgaccgctgacagtctcccctcggtacttgcctccctcgcgtgcgctcacagagacagaacagaccgctgcggccgctccggtcgaggatgacgtcgacctcgaacatctctcgtcagatgacgagcgcgatcggcaagcggagcaacacgcacgaccggcggccggttcaggctcaacctcggctgcgaccgagcgcaagcccggaggcggcggcgtcggcggcaagtcgatctcaaggttacgcgagacattgcccgagcctgcagaaggggccgtcgaagcagagacagatcctctgtcgtacgtcgatctcaattccctgccagcagttgccacgacgccatgctgattctcctccttgcgccctggtgcagacgtccaccctggtcgctggtctctgacccggccgcccttcggcagcacctcgccgcccatccagcagccatcaatgccttctcgcccacaggccagactctcctccacctcgccgccgacggtgaccagtcctcgacagtctcgctgcttctcgagctcggcgccgaccgcaacctgcgcgacagggcgcctgcggatgatgacgacgttggtgacgacgaagatgagggcatgacggcgagagagatggccgagatcaatggcttcgaccgggtggttgcgcttcttgcgtgacccctttttgatcgccctcaacgctgctccgttcatcttttgctgtgacagcgtgcagctctttcttgcgtgtcctggtcttatgtacgcctttgtgcagtaggaagttcccagggaagtgacgggggtccttctcgtcttcgaagtggccctcgcccgacgaggcaggatttctcgaccgcgcagcaccgccgctcgacctcgaccttcacctcaacccttctctcactttcacccccctactttcaccctccccctttaccttctctcagccatggcccgcgtcaccgcaatcggcatcaaaaagcgcaagtacgtcgcctcggacccgtccgagtcgccttttgcggcccaggacgccgccgccgccgcctcggccgcgagctcagcccctgcccccgcaccttccgcacctcctgcggctaccccagccgagcagaaacagcaggccgcgctaatctcaacggcggcagcggatgcggatgcggatgccgccaccagcttggccgaggagggcgagccgtcggccaagaagcacaagaagcagcaccgggggacgcgcgggcgcaagcacaagttgcccgagaaggcgtcgccgacactcgctctgctcgccgcctcggcgccggccaccgtcgctgctgccgccggaccttcgtcaacatcctcgacgtctgctctgccgaaggctaccgcagcgtctgtccgtccgccaaagggcatgacgggctcgaacgagggggctaagggcgactcgggctggggggcgcgcacgcaggcaccgacgttcaacgccgacgggcggaagacgatggccgggctcgaggggcccaagccgagcgaaagccaggttgggtacgaggctcgggtcgctgcgcgtgaagcgcgcaaggagggcatcaaaagcggcaagggcggtgagccctacgacgttgcgtgcgttctccttccggcgccacgctgacaacctcccacgctcgcctgctggcagacgcctctgcccgcgccctggcctcggagaagcgccggctggaccggatcgccgagcgtgaggcggcgacgacgtgctttgcttgccgcggtcaagggcacagcgcaaaggagtgcccgaaccagctcgatggcgcggtcgaggtcgacggcgtccggacaatgcagggcaaggatgccgtcaacatctgttatcggtgcgttcgagcctttcctttccgtcctgtgcggctactgaccgttcgctcgtcctctcggtagctgcggctcgacctcgcacacactcaaggcgtgcccccggccgctcaacaaggccaacccgatgccgttcgcttcgtgctttgtctgcctcgagaagggccacctcgcgtcgaagtgcccgcagaacgcggccaagggcatctacccggatggcggctgctgcgggctttgcaagggcactgaccacttgagccgcgactgcgagcttcgcaagaacggtgagctctacccgagcgtttcgacccttccagccgccagtcggcgctgacaaatcgtttgctcttgatttatcccccccttctctagaccgcctgatccagcacacgctcctcccgcccgcgccggcgaccggcttttttgacgactctgcccttgcgtctggcacggcctttgtccacgcttcgcgccggccagccgcgcccgcaggcgccgacgaggacgacttccatgcgctcaagcggacgcgggatgccgtcgagatcgaggagcggcaggaggagctgcaggcggccgctccggcgcgcaaggcggcgcccaagagcaagaaggccaaggtcgtcagcttctgagcaggggcgcgcgcgacacctaggacggcatgaatgatcccttcgcagctttctcgctatggtctcgttcatcatcgtcaggacaacagggtattgcagcatcagcaaggatacaagtggcccggccgagtagcagccccttctcccgcgcatgcaaaggcagcccgttcctcgagcaaagcctgctgcgtcggcacgcccggccttctacagaaggccttcagcggagccgtgcctcggggtcccgttcctaggatgaggggcaaatgaggacgaccttaaattgtcagtctgtttgcgcgtggcgccggtccgtttctagcctacgcctttcgccggctgcgcggtgggccagggatcgttgtcgcggctgtcagcgacagctagttgcagcacagtcgtcttctgacccgacctccagactgtcctgctggaaggcgagcaagagaggacagaccgaggttagtcttctttgaggatggccgggacgacggtcaaaggtaatggctcggaggggtgagctgcgcgacccggacgaacgtggttgcaacgaccccgcacgaccgctctcgcctcgacctcacccgtcggccaaagacggctggctcgatgcaggcagctctgctcggcaaggccgatggacccctcgtctcctccgtccaacgaacgctccgacttcctccagcccgactcagactgccctcgctcgctcagcccttgccctcctcctcctcctgccagcagcccgaaggagaccgtccctcgagccatctgcatccgagcctcgaccttttcgcacgggaccggccgctcttgtgccccgccttctctttctcgagcgaactgcctgcttccggaccggcagatcatgtacgtctgctcttgccagcgcggaggtcgccccgagcagctctccgcttctttcctcaaggctgaccgatgacgacgcacgttcagcaggacgctctcgcctttctacgttcctcgcccttgaccagacggcaagctgcggcgctttcgacaacgtagggcgggcagcagcccagagacgacgccaacggcttccctcagggagtcggctagtgtcgagacgctcgtccgcagcggcagcctggtcggcgagcggtcgactgagcaggacgaggaagccagcctgctcgtacgtcggtctttacctgctcaatcgtgtttgcgtttttctttgctgacgatgccgccgtcgccgttcagcaggaaattctcgccttggacgacctctccgaagtcggttggcaggcctacgacctctgcctgcttcccgacgccgagcctaggaaggctcatcggctggccgccgctctcctccaggccgcctcctcatcaccagctccttctcttcccttgccctcaacctcgaccgcttcgccaccgcctccagagctcccgtcgacgagaccgacgccctcctcggatcgcctccggcaggttaaaggggcaacggcgctcctgatcggcctccacgccctcctcgtcggccacatccaagacctggcctgcctcgaagatctgctcgaggtccttgtcggcgtcttcatccgaggcgtcgttcggcctccccgcgtcgcccaggccgaccagcgcctgccaaacgagcttgtcgagcggatcgtaggcgacgtcatgtgggacgagacctgcccgtggtcgctctggcaactggcagcctgtctcctcgagcggacggagcgcgggctaagccggccgatggccaatgctgaactcgaccggccgacgagccgcatcctcatcagtcttgtctacctcaaggccttgctagcggcggcgagcgagacgcaggcactagccgatgcccgctcaagctaccagttcaccgaggtgcgtctgtcaactgctcatccgcttggcagcaggaacgctgacctcttctctccgacgcaggttgtcaagctcggctgtgcgattggcattctgggcgcctcgccaacacctccagacccgacctcggcccgcgaggctcacatctcgaccctcgtctggaagagtcgcaaacggctcgagctctttggccatctcgacgtcgcgctcgccggcttgcccaatggcggtcgagactttgaccgctgggccggcggcgcgcaggaacgcactcgccaggccgaagaggtccgtcggcgcaaggaggccgagaagaggcttcggcgaccgtcgtctcgacctcgtcgagccagtgcgcgcgccacattcggagccgacgaagtaggcggtctctgttacgagcccgagggcgagctgctcgcgccgcccgtccggctcaagggcaagaagattcgccatcgccgagcaggatcgtacgacgctcgacggtccatgacgctcgacgattccgtcggcagtcacgcaccggaaacgacaccggagggctctgacagccacgcgcccctgtcttgcgtcctgcgtggcggccaggcgaccgactactttcaggacactccctgcctcgcaacggcgccaacaaagcggagcgtctcggcaacgagcctgccctcgcttgagcgacgatcctcaatgtgcctcctccggtcgccgccaccgccgccgagtcagtctctcgagctcgccagcctaagcgactttgccgtccacctcgcatcttcgccgggcgactcgccgtttaaggcgctctgtcctcggccgctgccaactttgttcaacacgcaaccaatcttctcgctcgctcacggcgactttaccctccgggctgaggacggcgcccaagaggacgaatacgctaccatcgctgccgcccggcaaaagacgtcgtggctccgggcgattcgagcgcaggcgctcctcttcacctttcgacttcagccgctgaatctgctcgccaagaggacgacctcaaatccctcggccctcgacgacctcctccgctccggtcgggaggcaggtgaccccgctcaatcaactcgagcttcgcaatcctcgtcgacgcctggcggctcgcctccgccctcgctttcaacctccttttcgtccgactcgaccatcatctcgccgctcgcctcaccgagaccgatcccgaccgctgttatcccgacgatcggtttcaccccgtcatcccatctgccgtcgcacggcggcgagagcgtcggccgcggcgcctacgccggccggactttcaagttgtccactcccgtctcgtcccggctcgacagcaggctgcggcgggagctctgagacctcaaggcaacccatttcacattctcaacaaaccagcgagctcaccctcgtttgtcccaacctctcgccgttcttatccctgtcgccgcttcgcatctcgccggccgctcaactctggccctacctcgctcgcaaacttgtcccccttgtgctttcttactccacgcgcatcttcacctgcaccgtcctctttcgatccatgtagctctacttccggccagtgcggcgtgggtgagctgctgaaggcggcggcaagacgacgcgacgctaaccaggcacggaggtcctctcactgataacttgccacaagctctaacggcagcttgccttgcagtctatctggcgaggaccgtccctcacgtcttgtgtgcttcaggggctgcaaactcagctgcacaagacagacaagcctgacctgtcgagagccgtgcaagaggatgcatcgcgcttcgacgcgcagcagcaggcacgcacgcgtccggaagcaagggacctcgtccgtaaccccagaggtcatcctcgccctcgacgaccatcctccctcgctgcctctttcctgtcgcgccttcatcgggccctcgtcgcaccagctgcgccacactcgaaggccgcaccaactcgccagccagctcacgccgctgccccgtcgaccgcagcttccccaaggactttacgctccactcgcaccctcgcccgacatggccgccgtcgccgtccttctcgacctgcccctcctccagcaagccgaccggccgttgccgccgctcgagactgccccacaggcaccagcccatcagacagagccggccagcaccagcgacagcactagcaccagctcgtcggtcgtctatattgcgtcgttcgcaggaacgctcggcaccttcttcctcgtcgggtgcttgctggtcattcgcgctcaccggcggtcgcaacggatcgcgctcaaccagcacctgtcacgtcgggtagaaagctgggccggcctgtcgagcgggggtgcgccgggcgcgcagtcaatctcgggtgactggcgcttcgtcgccggccacggccggctgcctgttcccaagctcttcgaagcgcgtatcgactcggttcttgatgggacgctggcaccagcggagccgacctggaccgaggcaaaggtcgtgagtctgacgcctgggcgcctaatggaagcttcacgcgcacgctgaccgcatactcccatccgtcccgacctcgtagccgctcttccttgccctcaccaccagcgatgccgcctccgatgtctgcgccgaatcggacgctctctccctcggccagctggcgaccgacgacacgccggcctcatcgcagcgtcggctgctgcccccgttcctgcgccagtcatcgacggctgagctgtcgtttgagggcggatcggacaccatcacgatgcgccgtcggccgagagcgctcgactccaatgccacagctgccagcgacgcagtccgagtcggagtcttggtcctgttcccttgcactcggcaggactcgccgttggagcggcgggtcgacagcgcgcgccagagcgacggccaggaccagcaggccaacaaccaggacctccctcccctggcaatgggcatcgaggacgtccggctcgtcagggcctgagttgcttccagggtcagcaagggtcgctgcgaaatgtgagcggcggggatggggggtcgttggctggcacgaccgaggacgaaggctgtcgcgccctgggatcggcacagacggaaggccgggtcagtgcagacttggtcgtatgctttttctcttctcactcccatgcttctctaggcacgattgatgtggtcggtcgctggaggatgctcccggcctgcgtcactcgcaagagggtcggtcagcctgggaacctctctcgcgaaactgcatctgccgctgtccaaaacctcgcccagatctcccgaacagcttcctgttgctcgtcaccgaccacgcacacctccattcgatccacttcattcctacgcaaacatgtcgttcgtccctgcgccggttgcctgccgggctggtggggcttgctgccagcggccctccttctggacgcgctggttgacccgactgcgtgccctctttccctcctcctgcgcgcctccgcgacagcaacaccatcgcaaacaccgccggcgagacggccgaccgatggactgagaagaacgccgaggttctcgagaagctctttgcccgtccgtgcgactcgtgcgcaggatcctgtagctgtcccttggttgacggttcacctctccactttctcctggaccagtgcgcaacgagactgagcaggagatcatgaaagtccaggctaagctctacggcaagttctacgctgctcgcaaggccgagattgccaagatcccgcacttctggttcggcgccttcatcaagcaccccgcgcgtccgtcccttctgttgccctcccgaacttgagcttctcgctgacgcctgcgcggcctggcgctcccttgacagtctcggttcacatgagccctcaggaccaggaggccatgacctatctcgaggacctcacgctgactcagggcgaggagggcaagcacatcgagagctacgacctcaccttcgttcgttctttgacagccagctgagctgggccgccgcggcgatcgacgactgacaacgtgcgtcatgcgcctttttctgcagaccttcaaggagaaccctttcttctccaacagtgcgtgtccctgcgtcttgatcagctcctctctggtccggactgaccttgtctccccctcgcagccgagatcaagaagtcgttccaggtcgaggacaacgacgagggctttgacgtcgtcggctccgtcagtttccgtcccgttgctttgccccccatcccacgagctaacctagcctgatccccgttatatcctcaggccgcgacgatcgactggaaggatgacgagcacaacctcgtcaagaagtcgccgcgcaagattgacgagtcggacgagtcggccgttggcctcgacccgggatccttcttcaacttcttcaccgagaaggaggatttcttttcgatcggcgagaacattcgggacgacctgctgccgaaggccgtcgagtggttcgccggcatcggcgaggacgacgaggacgaggatgactttgaggacgagagcggagacgacgaggacctgtcgttcgacacgcggccgaccaagaaggtcaaggcatgaacgtcgcgcaacggacgaccggaatgagacgcaggtgggagccaatcggacgggcgtcggcttttcgaagatcagcttcggagactcacgcctgcagtgagctaccttgacggatcgacgccatgctgcggccctggcggtcgagggggtacggaccaaggacgtcaagagcagacgctgctgggctgccgatcaaagcactatttcacgctctcccacctgctctcagtcgatgcttcatttcagaagcctcggatcggcaacgcagtgcccagggattggacgccggcttcccgcagagcagcagcaactgggccgcccatgcccccgctttgaccagcagctctgttgcgaagctgcctgggcagaccaccattaagcctcccggacctggaggctgtggtaggagacgggtgcaggaggttctgcccccgagccgggcctcatgcctgccggcctattgcgtcgatcgggcgcttccctgaccggcaacgacgacaccgcccttccgtcgcttcccccccttcagccttgggctggcaacgctatcaaggcgatgtcccgactgaccatctgcccgctcgtcaaatgcaactcggatcttttcgacggcagggccgagctcctcggcaccggctctcgctaataagctttcgcgccggccgcaccgtgtctcgcctcatcgccgcccctcggcccactttaaaacggcgatggcttgccctcccgccctccaaacgatggagggtctgccgagcgagctgaccgaggatggaggcgtggatctgacccagctcccgctgctcccttgacggctgcttcgtcttcgtggcccgtcgctcgttcgtccacaactcccttggtcgacttgacaagctactctcttccgagatggctcagccttctacctccgccgacctccctcctaccgccgccgagctcgcggtcctggccgattttgtcgtcttctttgtttgcgtcgctatcaggtgagctgcttgcgagagcatgggcctcaggtcgtcctcggctgactcgcatgcccttcgcagctgggtcatgttcggctgcctcatcgttcagttgtccagcttcctttttcagcggccggtccataagcgatctcgatggctcgacctccggcctgtcgtctgtctgaccgccggtgagtctcgaagagtgactcgaccttggctgctgtcgctgacccctcatccgactgccgccagccctcgtcttcgtctcgtcggcgctgacctttgaccaggtcatggcgatgagcacgcgtcactatggcgactatcgctggatggccaaccaggacgagcggccccaggcgccagcccagcccgcagtctcgctcctcgtcgtcgtcctctgccaactctgcctcatccatcgctgtagcgctttcgcgagggcagcaaatggggcgcgtctgccgctccgtcgctggattctcgcggtcggcctcgcagctttggcaatcgcttcatgcgtactcggcatcctcagccagagggccagcctggtttacgcagacagctacgagcaggaggaggcgtcgcgaggctcaaagaccgccctctttgaggtcctgcagggcgtctggctggcgacgtcgctcctggtcgacctgtgagtggcctcggcgcggcctagagcagggcaaaggctgacagcttcccgtcatctgtcacccttcctgcagcgccctgtcggtaacgatcacgctcgacctcaagcgcgcgatggactttgcccggctcgagtcgcacgatggcgtccagcaaaacgcgcgcgaggtccttcgggcgatcgtcctcattacgatccgcaacgggagcattgtcacctgcacgcagctcgtcttccttgccaacgtcgtcagcggcaaagccgtgtgcggccatgcagcccttgtcgtcctgcctccggtccagctgtcggtcctgcttgctgccctcaacacaccgcagcagattgcacgagcccagcacgagcgggcggcagctgctctggacgacgaggagagtcgatcgggcgtgccgctctcgtccctcggctcgtcggcggtgcctcgcgactcgtcctgcgtcttggcagacccccggccggctctgtcgttcgtcgagcgcggccgacgaaagctgctggctcgctgcgagcgccggtggaagcgcccggcgaggcggctcaagatctgagcctcgttgccggttgtctcgacgacggcgatgacacttcggtcgtccaggccgcatcggctcgccacagtagaggagaccaattgctctgcaggtgcgtcttctccctccttctttggcctcgcaccagcacgctggactgactctagggactcacagcctgtcatcagtgttccgatgccagactcctgagcggctcgtccgtccacactcgcaactgccacctaatcagccacgacacgcgctctcggtcgccctatcgtactgaagctagtctcgctcgcgcctcgaccagcaggccaggtcgagatgccattgtcagcaccacgctgcaccaaggggccgttctgccgatcacatgcccttttgtggccgccgtcgtccctgcgaacgttgggagggccgatcttgagtggagcttccgctcgtttcagcggccgagggtagcaagggatgagggcgagccgggagaacgagccgacgccggccgccggccttgctttcatcagccctcgcccgcagcttgcaccctctttgagagatcctctcctgtcgctctccccgcgtgcgacctcgaccaaggggtcagtctctgctgtccttgcgcgcctctcgatcgacaggaaggggatttagaagcgcccggcgcaggagtcacgtccgatagccagcgctgacgatggcgttgtcgtcaaacgggcttcgcggcctcggccagagcggtctcgggcacggctgtcgcttgcgccgtcgaaccctgacctcgactcgtctcgttgctgcacagcttgctctctgtctctggctctcttgcacctagacgatctcgcgccctagcggtccttcctgtgagtttctcgagaagccgctcttcctggccgctcgttcgcgggctgacggtggtggccgagggtctcaccgctctagggcttgctcccgatccagctgctcgcccgccgtcgaccggcggcccctcaacaagtcgctgagcttggtgagcactctcgagctggcatgctgctggatcgctcaggcggctgtcgtcgaccaggcgatcttgctcgtcgtcgctctgcctggggcacccatccagcgcagcacctcaacctcgcgctgacgtcgtcatctctccgactcttcagccttctaccacgccgacggcctgcacctcagcctcacgctcaactccgacgcagagcatgtctcacagctcgctaacggccaacgacgttgcgctcggtccgccactcgctccggaggagccggtcgacgctcgcagcgctgaggccgcgacgacgacgaccgaccagcagccgccagcgaggtctgagctgacgccggcggtcgcccagcacgctccgggcctgatccaccagccgacgacgggccaggaggatccggcgaacaatgacggcggcgcttcgacttcggcaccctcgctctttgctttcttcagccagctcgccctccatgacggccacggcaacggcaagggcggccgggacggccctttgacgcacggcatcaaccggctcgagggcgtcgaggacgccggtatgtcggaggaagagtatagcgactcgtccgacaccgagtcatcgacactcgccgacggcagcgagacgcctgggaccggcgatgatagggaggacgaggaggacgagggcaccaacctcgggccgctgccagaccacgcggcgcttggcaagcaccacgtcttcagaccgccgccgccaaagctcgagcgccagtcgtcggccgactcgtttctcatctcgaaccggctcgcccaactggccgtctccaaccttgcggccgacgctcaaggctcggctggcggccacgacggtcgggccaaggccgacgatggctggacggacgaggaccggctcgctgccatcaacgacgaatttggcgctttcgagcagcacttcaagacgatggccgaccggggcgagaaggaagtgtttctcgctgctggagtcggcggtcttttcaggggcattttgatcatcggcaatctgcacctgacgtcgcaccgcttgacgttcctcgcacggatcccgccccttaagccgggctcgactggcccgctcctcaagtctggcgcggtccacatctggaaacggcggacgcggctcggcgtgccgtgcaccgttcggaaacgcgtctggctcgagctcagcagcgacatggcgacgacgtacccggacgcctccgaggctggccggacgcggccgctcaagacggtcctgctcagtagcatccggcggattcacgaggagaaggaaccgcgcgtcatggagattgagctctacacgggcgagggcgcgccactggacgtccgccgactcgaatttgacaccacagagtcggccctcgcctggcggcgcgagtttgaggcagcgctgtttcaccaggatcgccggcgccggcttaaggctcgtcggtcgacgggcaaggaggccaccgatgccgagcaagagtccgaatgggaacgcgtccgcatcagcatcccgctcgagcggatcgagactgagcagacgtccgactacatgtcttttgcgacgctcgtcgacctccaggtcaacaacgagcccacgccggccttcacgctcgcggcctctgacgcgagcaccgactcgctcgaaaaggaaccctcctcgccgagctctccagtcgagccgttgccgaccgccaatcagggcgagagcgcccctgcccggctccacatccagctcgccctcctctcgtcgcagcacgagttcatcggcaagtttgagcgcgcccgcgaggaggtcctccagcgccggcgcgactcttgcgggcccggcgcgagtcaatgccggcctcccttggtcgacctgaacgaggtgtttcgcgactatctccaccgcggcgagaatggcgagccgtacggcaagccggacggcgaggcggtgggcgctggcgctggcgaggatgtcggcgagcagacgcttcggacggtgttcggcctcggcaacagcgaaggaatctggagtgcgtctgccaacgtcgtctgatttgcctcgtgacagtgcgactgacgaaggagctttgcgctggccagccatcggctgcggcctccagcgcgccctcatcccgacaaagggccagctgatcgtctcgccacagtacattggcttctatcggcacactctcgccggtcgtgacatcaagctgcgcttcagaattgaggacgtcaaatcggcaaccaaagtgcgaccactcttccctcttgtgcgcctctgtcgctgatcgacgcctgccggcaccccaggcttcgacgatgcacctcagcaccaagggcatggccatccacgttcacggccacccggacgttctgctcgagttcttcaacaagcagcaccgagacctggtgcgtcctgcttgccgccgaaatttggaattgaagagacgactgatccttctgaactcgcgcaggcgatcgagcatgtcaacgatgccgtcgcgacccacgccatctaccacccggccagctcacaagccgactcgacactgacgccgtcgctcgcccggtcgtcatccgaggcgtcgacttcagacgccagcacgcttctcggcggcccgctgaccaaggcaccgtcgacgacgcccgaggatgcaagtgcctcgaccccgggcgacgtcagcccgtcgaacgagacgcggcagatgtcgcgcaacgacgacattctcacctcgagcctccgcaaggcgactggtcccgacaatggcgatcacgctcgcttttccgacaacgcgttcaagtgggtctgctcgcgtccagacgcttctctcctggtctgatgctctgccgtgctccgcagctacgtgccgcgtgtcgtcaacctcccgcaaaaggatgacgaggtccggaccggcaagcgcgtcgcctcgcgccacttttgcatgctcaccatcggctcgcgcggtgacgttcaagtgcggccgcgtgcgagaggccctcatctcagcccgcatactcgctgacgctgctcaccttttccctccggccgtgcagccttacattgcgctcgcgctcggagtgagtcaaagcggtcgctcggggactcgagcgcgccaaatgctgaccctactgatttttgcagctcatgaaggagggccatcgctgcacgatcatcacgcacgacgagtttcaggactgggtcgaaggtcagtctgctcttacactttgcgcggtccgctaccggcgcctctgctgacagcccttgtgccccactcaggctacggtatcggcttccggcaggcgggtggcgacccggcggcgctgatgaagctctcggttgagcacaaggtgcgttttgctttgcgtcgtcgctctcagttgccgcccgtctaggggctgacggcggcgacctcgtcctgcagatgttctcgcccggcttcttcagggagagtctcggccacttccgcgagtggctcgaccagcgtgcgtcctcgttttccactgtccgggtgctgtagctcctgactgactttgccggtcgtcagtcttccacgatgcctgggtggcctgtcatgatgccgacgtcttgatcgagtcgccctcggccatggcagggtgcgtcccaccgggtcacctgccctttgcctaccaagctgaccgctgccgttatctcttccagcatccacattgccgaggcgctcaagattccgtacttccgtgccttcacgatgccctggacacggacgcacgactacccgcaagcgtgcgcagctgcccgccgtacgattgcctggcgacgactgacacagcctctcgcccgcctgtgcagcttcatggtccctcagatcgagatgagcggcagcttctactacgcaacctacgttctcttcgacaacatcagtgcgtgcgactggaccaccgcggcatggcctgctcttgctgacgcgccctgattctcgcagtgtggaaggcgacggccggccagatcaaccgctggcgccgcaaggagctcggcctcaagtcgactgtgagcggcaaggcctcgaaagatgacacaccgaacgaggctgacttgcgtctctcccctcaggacatgtcgcacctcgagcagcgcgaagtcccgttcgtctacaactttagctcggcagtcgtcccgcacccgctcgactggaaggacaacatgtgagtcgtcgttgtctgctgcctagatgttttgaccctgacggcacgccctgctttgcgccagcatgatctccggctactggttcatgcccggcgaggagaccgagtggacgccgcccgacgatctcgacgccttcatgaagaaagcgcgggccgacggcaagccgctcgtctacatcggctttggcagcatcattgtcccgcacccggccgaaacgacgcgagccgtcattcgcgccgtcgagcgggccgacgttcgagcgatcgtcgccaagggctggagcggccgcggcaacgaggttgacaaggatggcctgccgatcgaggtcccgttccccgagagctgccactcgctcgagaaggtcccgcacgactggctcttcaatcggatcgacgccgccgtccatcacggaggagctggcacgactggtgcaagcttgcgggccggcctgcctaccatcatcaagcctttttgtgcgtctccccctgactgtcgtgcgacctcacgcaggggtgctaaaaaagccgctcctccctttcatgcagtcggcgatcaattcttctgggccctccggatgggcaagctcggcgtccgtttcgctcccctctcttggctttggcgatcatcggctgatcaagatgcatttgcctttgcttacagtgtggcatccgcgtcagcagcctgagcggcaatgagctcggcgacgcgctcatcaaggcgacgaccgacgacctaatgcgcgagaaggcggccaagattggcgaaaagatccgggcggagaagggcgttgaaaagacgatcgagtggctgtacatgcacctcgagcgagcgcgtacgtcccctgccccccctcgccttccaacgggccgctgctgacgctttccgcctcgtgtgccatccccaggcgaccgtcaccaatcggcgcacccagaggcgttaccatcgactgcccagcctcacagtcactcgccctgcggcttcctaagcggctcaaactcgcgcaacgcctcgccaatcggctcaccaaacacctcgccgacgacaaagggcctgccagccgtgcctaccctggcgtcgtcgcccagtgggctcgcgcaccacaaaaccaccggcgtcaagggcagtctgaaggaggctggaagcgcaatctcgacagttggccggctcgggagcgctctgaagggcctcgcaaagggcgccggcagtgggagtgcggtctgagccggcgttcttttcgtgtccctccgcgccttcggctcgctatcttgttgttcgatctgtcgctgctgctcaaatgttattttcacctgacggtcctcgactttcggctggagctaggggcgggcgaaaaggagcgacatggcaagagaccaaggagcgagagggcgacaggctgagcgagacaaacacaatgagagcaaagagacaaggagcgcggcggccgagcgagcgctgacgccggaagggcggccgtttcagaccgccgaccgcggcgggtcggcgtacgtgtagcagccgagggcgggcgaggccgggtcgaggagggcgccgagctggatggacgggtggaggaggccgagatcgatcgggaaggtagccgtcacctgtggtcgggcggagggcaggagggggaagggcaggcagacacagatacggaggtgagggagagtattaagagaagacagggaagcgaggctcagcatgacatgagaacagggagagaatggacgcaagggaagcaagggacgcacgttcgcgcctgcatccgagcggaagcgaccgcaggcacaaaaggtcagcgaccggagtgatgcgaaggcaggagacgagaggcagacggacggagggtcgagttgaagtcgaacgagtcggcgttgctgttaaaaaccggaagatgagtttagtgtcagccagccatcagtgagaggaagcgagaatagagcgctgacgcacccgtcgacctcaaacagccggcctgggaggtctctcgcctgccaagcccgccagatccggtcgagattcgcgtggtgaacgtagaagagggggtcgcccggcgaggagaagacgttgttcatctcgccgccgatgccgccgtggcctctgcgagggagaaggggaacaggttcaaggtgagccgaggaggaagaaaaggatgaaaatgaagaggagaacgtcagtggcgcgagcgaggcggacaaagagagaaggggacggaacgaagcgtgaatcgacggcttgccctcgagtctgccctcgaggacgtaatgcatgcgaccaaagtcgggctggctgaggacctcttcgatcgcctgaccgtcaaagtaacaagagggcgcattagtcagcgctcggtctgcgtccgagcaggaggagcagggcagggcgcacctcacgactgcccgcctcgagcacgtcgatgtcaaagtcgcgcacgaggcaatgcggctcgccctcagtagagttgcccggcccgagcgcaacctcccacccgccctcctcgcgcgagaaccggcccgagggcacgcaccccccgccggtgccgatgatcatcgccgcgcggcgctcagcctcagtttgagctggaaggggcgggaggaagggtgatgtgaagcgtggaggagggagtgggcgggcggaacgagggacgaagatgccgttgcctgcgagtgagccggggggtcgagcgagaggatcagtgtgggcgagaggggtgatgaaaggagaggagggagagggacggaccgccaaagccaaattcggcgtcaaagagctcggacgattccattgaaccggcctcgaggtcgatcggccagtgccagtactgcgccgaggagaggagtcagtcgtcagtcgtcagctcgcagccgctcatccgcaaagcaagacagagggaaagagaagagagagcgaggcgcaccggctgcgtccccatgaagccgcagtgggtagcgagcgcgcgctcaaacgtcgaaagaaaaagggcgtgccaggggaggaacgggcctgcccagtggatcgaaagcgcctgggctgagtgctcggcctgcgcgcgaaagagcgcgtcgtcagcgagggccgatcaacatttgtcgtcggccggcacgaggcgacagggagagcgcgggctcgcacctggaaatggtcataaacgctccggacaccagcgtaaggcgtctcgccggccgggacgttcttgaggcagacgaccgcgtcgaggtaggccgtcctttcggcgggggtgagggcgcgcctggtggagtgtgaagggagggggtcagaaatgggtgcttgagcgggcgagaggaggggagaagagggaggagggatgaggaggagagtgacagaggaaagaagcagacggaccactcgcgccggacatggagcgtctcgcatgccggcttggttgcgttcgcctgcgggacggcgtacggcaaaacgggcgcggaaggtgcaacggcggccgacaacgaggtcgggcgcgacgccggcggcgacggcgaggcgagctggcgaggtacgagcggggcgaggactggcgcgagcgaggctggagctgcgagggctggcgctgggccgaggctggtggcgaggaggagaacgagcagggagaggcgcatcgtgttcgagctgacaggggtgagaagagagagtagggtcgacggcgagagagcgtcccctgctcccaacagaagcgagcagcccttaaagctggccttcaacggcccttcatcgagcttctcatgccgcgcttggctccaatgccgtctctcccggaagaagggctgctgacggtggttccggccggcggtgagcgagcgaacgagcgcgacgggcggccgcgtatttcgggtagagcggggatagcgggctagcttcgggcgaaaggtcagcgtggagagagctgctggtgcaggtggtgctgctgcttgcccgttgcgacacgagcaggcgggctgcagagcaggtcgaggagcagggcagaaggaggaaggtcagccgtcgaccgacgtcgcgcctgtcggtcggccgtcgctagaggagctcgagccgaacacattcatgccactttcgaggcaagcgcgacgtatacatgtcatcccttgacggtttgccagacgacgacgacgttcaccggcagcagcagggcagcttgaccgaccgccgctcgtctgggcgtcttggtgcggtcgctgatagggcgttttgtcggcgagccagccaagacgccgctgcggggctcccagcacgtcgggccgaccgagcgacgacgagccagccacagccttctcctcctcctcgttccttcagcagccaggtagccattctctaccgccagcagcaagccagcatgtcgtcaacactcgagctccaacccctcccaccggccgccctccgcacgactccaccctactttgagcccctctcgcctgacagccgctcgcgcccgccctcgccgacgccgtccgggccgctcgcgctcggagaagggacgtcgttgaagccggtcgacggcggaagggacgcttgggtctttctggcggcggcgacggggctcgaggtgctcgtttggggtcggtccacgtatcgcctaaaggaggagagagcgcgagagctgactctccgtctccgatcggccgacccgcaggcctgcccttctcggtccgtcgtccctccagctctccatcgcctaccagcaactgggactgacgcgcctgtcctatcatctcgttggtctcaggtcggcgtcctgcacacctactggacaaatgtcctcttcaaggacgaccacggggccgaggcgacgctcacgctggccgcgacgtgcgcttctttccctttcgcttctctcgcctgtttcgctccagtccttctaccttgacgcttcctctatcccttccttactctgcctgactgcctgccttcttcgcttccttggcctctcctcacgacacgtgctgtgctgacccctcttcctccatcccatcaactcgcacccgtccccgtaccccatcccgacccctcctccctctcacaggctccaaaccggcctgatgtacctctcctgcgtcgtcttctcgcccctcctcgcccgctacccacagtacaggccacacatgcaagtcgccggcctcgcctgcgccgtcatcggcatcatcggcagcggctttgcgaccaagccgacgcacatcctcatcctcatcgggctcatctaccccatctcttgtgtcttctacctcccggcgattattcttctgttcggcgagtacttttcgctcaatttcggcatgaacgagggctgactaggacgtcgtccggcacagagtggtggcaggagcgaagaggtacgttccccgcacgtggccggctgcagttcaccgctctacgtcgtcggcggtcgaggggcgccacgaaagagccagagtcagactgactgagtgcgatactttacccctctccttgctgtcggtaggcttcgcgagcggcattatgtacgccggtcagcccctcacgcgcctacctacctcgcgacgcgtcacgaagtcacccgagaagacagaggcgctgacgagtgtcttgccctggtctcttgctctaggtaccggcgccggtggaacggtctttcgtacgtccctcgctcgcgttctcttccgcctcgccatctcgccgtctgaaggctgcggtccagacacctctgacccgctcagcttgcctgcctgcctgcctgtcctttcaacagcgttcatcatgaaggccctgctggagcggttcagctacaaggcgagcatgtgcgcgctcgtcagtcccctctcacgtctcgtcccatctcatcctaccctttcccccctcctctccttttttctaccctcctcttccaatctctcctctcattgcccttcctattcgctccgtgactacgtcccttcgctccccgcctgcctcccctggcccctttttccgccaacctcccccgttaaccgctaccccttccacccaccagggcgtcggctttgccctcttcggcctcgtcgccctcctcggcattaagccccgcatcccaatcacccgcgccggctccgcgagcggcaaacaccggcggccgcggtcgaacctgagctttttaaagcagagcgcattctatgcgtttacggctgcaatcacgctgacggtacgttggccgcgatcgtccactgcaggagatgaggttgttggctgactcatttcgagctcggctcttcttcgcaattagtcgctcggcaacgtgagtgtcatctcgctcttcgcccatccgctgcccaacgtccgcgctgactcgacatcctccccctccctccagttcatcccctcaatcttcctcccctcctacgccgctgccgtctcctccaagccggacgggacgaccctcgtcgcgctcatgaacgcggcctctgtgcctggcctgctcgcctggggatggctttcagaccgcgtgccaacaagaatcgtcgtcggcgtttgtgcgttcggcgctgcgctcagctgcatcttcgcgtgggggctggcgggagaggagagcgcgccgctcgtcgtgtttgcggtgctctgggggttgacggggctgagctttacgtcgctctggtcaaaactgatcacgatcgtctcgggtgcgtcctaaacttggctcgctgcacgctgcgtctaaccccgaatttgtcggactgacagaccgagctctccctgctgcccgctgctcgtcacgacgcaccaggcgacgacccgaccctcccgagcctcatcctctccatatttgccttcgcacgaggctgcggtgcgtcgcacaaggaggtccggccgggcgcaggctgtgtgctgaccatgcagaacctctcccctcgcgctcgcgacaggtaacattgccagtggtcggtcctcagctccccgccatctcgtttgatgacccgcgtccagccctgacaccggtcccctgctcctccgcccaggccccatctcgtcctcgcttctcaagtcgaccctctttgcgggcggaaaaggctcgtacggcaggcacggctacggcgccatcctgctctatgccggtccgtcccctccttctccctcgcgtttcggcccattcccacagcccgcacaaggactgatctgaagcaaaatattctttcctcctttccccaaggcttgatgaacctcgccggagcagtcagcgtcgtcctctaccgcacgccccggaagaagatctagaaaagggccgctcaaatcggccagctcatgcctgttcgggacgaccggtcgcaaggcggaaggcgagaactagcctgtcggttggtcggtcggtcgtccgcgctcgcgctcgcacagccgcgctctccgaccaagagcgcgagaggggaagcatcgtttgtatttcgcgtcagtcaaaagcaaaagcactcgcaaagcaaatcttatgtcttgttgtctttcctctctcgcttcgtccgctgctggccgggtcgagcgataccgacaagcgtctcgggaagcgaacaagccaaagacagggaggtctcggcgtctgttgttggcccagttgtctggtagcgtcgttcgttggtcagttggtcctttcctcctctggcggtcggccgagtttgatgttgtccgagactcgttcccccgcgtgggcgatttgtctctcgtgagcgcccggcaggcgggcggtgccttgtcgcgtcgcgtcgcgtcgccgttggcgggcgggcgggcgaggagacgcgctcatgcgccgcagccagcagccctcgagtacgagtcaggagcaccttctcgtcttcgccgccctttccacgaaacgccagtcacctctctcgccctctcgctcgctcactcgctcgctcgctctcttcgcgaggcacgcgcgcgcgtctgaatcgggcgccgtctgaggagaccccgcgcggggggagtgagggcgcgagaaaaggggctagcgcgggacgagtcgaaaggaggcccacgcgcgcgcgcgcgctcgactctgctcgaaggagagcgaagaggatagcggtacgctgcatggctgctgctcctactgtctctgctgctgggagaatagagcagcgagtagggaggagggtgggatgagattgcaggctgcttaagcatagacggagggttcatcgatggaggcgaaggaagctctgagaggggccgccgagctgcttgcccgccaccctcccctgtgtcctgcggccgtcaaagggcgttttcgaccggcgtcccttccctcccgaccgacgaccaccttcgacctcttctctctcgcgccagcctccctcgccttcctcgcccgctccctccgtcgcccaacaccacccgcacaagcacgcacgccatggccgctgccgctcccgaatcgaccgtcctcgccagccaggccgtccctgcgcccgccgccgccacctcttcctcctccgacgctgttgtcgagcccacgcccgttgccggtgaggaggctactgccgcgactgccgcgccggccgtgctcaagggcgagaccgaggtcgctgctcctgttaaggagacgagccctgtcaccgctgcttccactgccgaggcccctgccgctgttgacgaggtccgtccgcccttctccttccttccctctctccctttcgtgtagccagcgacctgctggcgctggacgacccgtcctgcgcaggatgggctatctctgcgcgcgcgatccgagctcaggtctcgacggctgacacgagcttcttgctcttcctcgtgccgcgccgctttgacctcgcacctcgaccctgccgtccctttcatccgaccgcgctttatcttccacgctctcagaccgccgccaccaccactaccgccgccgacgagacttctgctactgctcccgccaccgccgtcgcgaccgacggcgagcccaaggccgaggtgcgtcttccttccctttcaacccgcgcgcgcgcgcacacgcacgcgtcgccggctccggctgtttacctcgcccgtcgagcccgaccgctgaccgtccccgctttctcttcctttcgtcaccagtcgcccaagaaggagggcttcctcgccaaaattacgagcatcttcaaggaggacaagaaggtgcgccctttgacgccggctgcgaaatctcggctttggaactgacctcgtcttctctgtatcgaccaggtcgctgctgagaagaaggcggctgccaaggccaaggccgacaagaaggctgccgatcacaagggtccgtcgtctcctgccggtcgatgctcttgacgatgttcatctgaccgcttgtcgacgacctctgcgcataccgcccgtccagccgcccaggagaagaggaaggccgacgacgaggccaagaaggccgaaacggctgctgctgtgaccgaggcggacgaggctaagaaggctgccgctgtcaagaaggacgaggagaacctcgcggcggtcgagaaggctaacgtgggcgctgctgctgtcgagtcggctgaggctgctgctgtcgagtacgtttctcgatcatctttgcggcctccgagaccgaccgtcgttgactaacgatcctcgacttgttagcagcgccccggtcgccgttgccaagatcgaggagcccgttgctgtcgcccctgtcgtcctcggccccgaggcgaccgtcgagtcgacgccagccgccgctgccgccggcaaggaggccgaggctgctcccgctaccgaggtcgctgctacgcccgtcgcgtccgtctcctccctttgtcgactcttctgttctcaggtcagggctgacagatgctctccctgtctttcgcagtgccggcgagaaggccgaggagaagcccatcgcgcccaaggctggccgccggctgagcacgcgcatcaccggcctcttcaagggccacggcagcaaggaggccaagcagccgacgacgccgccggcgaccgacaaggtcgcggaggaggcgcccaaggtacgtcgtcttgcaaaccgctttgcctgttgacgtcaatgctgacaactcttgcgtggtcctctgtcagctcgacgctgtcgccgcttcgaccccgctcgagtcggccgctgagccggccccgaccaaggcgaccctcgccgaggacgctcccgccgtcgctgccgcggatgtccccgccgccacccccgccgttactgagctggttgagacgactaaggcctaagcctatgcctcctccttctgctcgaacgaacacccgacgactgcttgccccttcctgccttccttgacgaccacccctccttttctctccgctttatccctaatgctctcctcgtctcttggtctcccctccgcccgttcgtctactgtcagctctctcgcttaccgccccctctctatgccggctcgcctatcaccccgacccccttaatcgcctactctttgttcgcggagcgtgcactggaccggtctctcacccgatactatgcgccacctttgcagacgaacctgagtgacggcggatgggcatggcgaggcgcacgagaggtggtcaaatgcagagcgagttgttttcaggccgagacgaggttgggcaggggagaaactgtgcgctagtctagtaaggagaacaaagacctgctgaagacagcctcggggccgactctcgagcagcgcagcacaaaggtgcagagaaggtgggaggcgaacgcgagtgtgcttgcgctgaaagactggccgaggcccgaacgacccaagacaccgtccatcgatcgcgcaagcatcccatccacaatctcgcccgcccacacccacactcaacgcgaagtgacgccgtaccatgccagaccgccgacaagccctccagcgatcgccccgggtgcagggacgccaaaccactcgaccgaaacgaaggttgctccgacgaccgagacccagaagccgtcagagtcgagcgacttgtagacggcgggcgtcgcgagtgggtcgacagccgggtcgacggtcgcgggcgagaggacgccgacgcgaaagaggcggtagatggcggcgtaaatctggcagggcggggggcggggagagcgtcagcaaaaaaggcaggagcgcgagtcataaaggggaacgtacgagtccgacggccgctgcgttcagcccgcgcaggacgctcctcgtgactttactcgtccgccagcggaggtagaacggcagcgtgccgaccttgatgacgattcccgggaggaagatggcgacgagcgcgagcagggcgccgactagcggctttgacgggacggcgaggacgccgagaaagacggcaaagttgaaaacgggcccggggagcgcttgtacgagggcgaggccgatgagaaagtcgcgcgggaggacccagccggggtcgacggtgtagccccgcaggagcggaatcacgactaggagtcggggtcagattttcggcgacctgaagcgaacgagggcgagcggcgacacgcgaaaacataccaggtcctcctccaaagatgagcgtgcctgcgggttaaggagcgcagagcgtcagtcgcgagagcccaagcaagaattgcgtcgttgacggcggggacggacccgagagtaaaatgttggtgaaaaagtcgagcgcgcgcgtcggccggtcgacgaccgaccgggcaacgacgattgctatgaagaaggcgatgaaggcagcgcacctgaacgagtttgtaatggtgtaagccgacgagtaagcacagcggaggcagccggagacgcacagtgccagaccgcccttgacgccgagcttaaagtagagcgacggcgcgagctcctcctccttctcctcctcgttgtgctcgggctcggtcgcgaccacagatgccggacgacctgatgccgaagcgagcgaagggacgccggccgtctgcgagccgccggcgtgggcgattgacctcttgtcgtcgtcgccggcgtcgcgcgaggccgactcggtcgacgcttggcgagtggccgaagacgagtctgctccggtcaccatatcgggcgtcggcgtcgtcgttcctgtcggcccgccctcaagctcgatcccatccaccgtctccgaggttgtctcttccgacgccctgcgcttgttcctgagcgacttccacctccggccgacgtttgccctccacgcggcgctgccgtcccagctgaacgtcgagaggccgccgacaaccatgatgaccgggtagagccactggctttcgtagcaggatgcgacggcgcccgagaggaggacgagcagccgggtcagcgggtcggtgacaaccttggcggagagcgtgtaggctgaatgggcgatctgtaagccgaaaagcggggtcagccgaagtcaaatcccgaccctagaacaggggatgaagacgcacgagaccgacggcggcgctgttgagcccagagaacagagcgtagacaatcggcggcagctgggccggcagcgacttgacggcaaagccgatgccgagcatagcgcccgcgcccgggccggtcaagaggacgaacgagagaagggcggggaggatgccgccccggagaagggagatggcgaaggcgagctgggagaaggcggggcctgcaggggagaacgtcagcggctgcgggcagggtgaaagggagagggggaaagaacgaaccggggagggcgttgccgagggcgaacagatcaacgaacgtctgctcgtcgacccagccaagcttaacgacgaacgttcggcggactaaatgcgcacacaaagtatcagctggagcttcttgccagtaccgccaggaagggctgacgctgaacgatgttggcggcaggcccgccgaacgcagtgaagccaaacgggccaaagtgccgggtgacctctgcgagccgggcggcgagcgacatgcgcttgagcggcgaggctgccggcggagaaacggcctgcgacggggtggcatgaagattagcctcgggaaggggaggcgggagggctggggacgaacaacagagtcggcggtcgccgtcgccgtgcggctgcgcgcgccggctgatggctggacggcagacatgctgaccggtccttctggtgctcctgctgctgaacgagggcgaggtcaaggaggagatcgagttcgcgaggtggtggttaagaagcgaggcgaggcaagtcgaccctttaagcattctggctttgcgggctgaacggcgtgccaagcaggcgcaagtcgaacgtgggccggccgacccgtcgcctgcctttcagcaagagcggcacgtccccgatcggtgagcaggggcatgtatgcgacctgctgcgacctgctgcagcatgcgtcatgttgcgcatgcatgctggaagagggccgagctgggcgacaagactggcctgctctgacgatgtcggctgggctgaacgaccttgtctttcgcttccgaccctccaaccatctccagcatgtccgccgccaacgccgtcccaggcctcgtctacacctacaccccacccaatgcgccgactgtcctgccgctcttcgagtcggccgacgtcgacgccccccgctgcgtgcgtcctcgctccttcttccctcccgaggcgcgccggctgacctcgcctcggctcgcacgcccctcgcaagcttagctcgtctttctcccgggcttgttcgacggctggcagacggtgccgtacgtcgctccgctccgggctgccctcaaggaacacggttggtcgctgtctgtccttcccacctgcactccatcagaaactcccagaagcttgtgctgacgcctgcccgcccttccttccttctgcgtgctcgctcgcgttcgtgcgacagagcccagccccacttgacgagcagctacaaaggctttggcctcggctcgcttgccgaggacgtcgagctcatcagccaggcggtcgactgcctgcgtacccagcgaggtccgttgctataacgctcgagccgccgagccgcctgtcgaagcgcagtgcgactgatgcctccttcctccgccctctccttcgtcgcctgctgctggccctgccctgattcgctctcggccctcccggcgcgcgcaggcaagacgaccgtcgtcctcatgggccactcgaccggctgccagcaaattatgacgtacctgctcccggacctccatccgtcggacgacagctcgcccagcagcaacagcagtagcagcagcagcggcggcgggcgggcaaaggtcgacaaggccatcatgcaggcgcctggtcagtccctgcgaggaacaagtgtcgctccgcccgcaccgacctgacgccccccaccctgtcccatcctagcttctgatcgcccagccgcctcctctcccgccctcgtccagcgcatcgccgacctctacaccgccgcgctctcccggggcggcctgagcgctgcgaaatcctcgctctgtccggctgaggtcgcccaagagttccaggtcgaggcgatcagcgtctatcgagcttggtcgctcttctgcattgggtgagtcggtcgcgtcgtcgttcgtgcggagagagacgtatcctgttcctctccctcaggcgaagaccgctcgacgctgatcgcaactctttcctttcggccttgcgcgctcgaccagcggcgacgacgactttttcagccgtgacatcccctcctccagctccgactcggctgccactccctcctcctcctcccccgaccagcagtgcccgccagcaagccaccggcccctctctcgcacattcggtctcctcccccctcaaaccgggggggagggggggggggcggggggggggggggggggggggggggggggggggggggggggttggccggcttgaggtcgttgggtcagacaggcgaggcgccggatgggacgagcgcgtcagtcccagacgcgcgccggctcgcccgagagcgcgagcgaggcattcagggccgcttgcagctcgtctgcgaagcagattgtccgtcagcgttggcgtttgcgtgcaaagagcgatccgacgtaccagcaaagcgatcgagaccgctccagaccgcgccatagcctctgaggccacgcaaactggatacgtcaaggcgacacgatcagcgactgaggcaagggagcgagttggacacccccggcagcggacgtacaggatccagcagctggcccagatgtcctggagctcgcggtgtactgcaagcttgtccatagcggtggggttcgtcgactggagagtgagcgccaggaggagcaggcagtaggctgaggtgcgctcgcagggcttgatcagcaaccgggacggaattcggggcctgcgagcggtgactaaccggcagcgaccagctcgcacgcgcagaacggcagcgtcggcatggcgctctcttggaccgaaacggtcatcgcctggttgaggacctgagacgagtagagcaactcttattcgtcgcagtgcaacccctggacggagaagagaggggcgcacctcaagtctggcgatcgcctcgacaccggcccgcaccttacccagactgtgctgggcggcgaaaggaccaccgagggccatcgtctcttccggcaggtctggccagctggtcgaagctggcgcagagtgctgtgttgcggctgcagtcttaaaaacgctggcagacgctgcattctcggccggcggcgaccaagtggagagggcgtcgccgagaaggtcgtcgaagcctcgctggatggggcacggcagcagactcgtcaaagcagtcggcatgctgcaggacgccaagctcggccaggcggagtgagaggcagtcgacaggcttgggctgacggtcgtcggcggcgtcgagatggccgtgaccgatgcaaacatctcgtcgatgcggacgccgctaggcgtgtcggagatggagggcaggccgcagagccgttccgtgaagacgccgatgccgccatggctgtgaagggccgatcggcggtgctgtccaacgcaaggcaattaaaaggtcgattttagactgggctacgaacggagaaggcgggagggctcggtgcgtacgagatcgacgagcgtcatcgtctgcgtgagagcattttctaaatcagcacggtacactctcctttgagatcgcccgtcggccaaatgtacgcacctggcacatgagagccgatcgtcggaaggtcgcacagagcatggcctcgggatcgagctggcctgccaccgaactctgcatggcgctgctggcgaggccgaccttaacctctccctcgcggatgaggttcgtcaggacaaggtcgagccgctcgtactctcgaatccgatcgtctttggccatcgccccactcgcaggggtcagatcaaagagctggtgtggattcgacgggatgtagcctggcgaggaggcgagctggtcgataaaggaccggacgtagacggagtacctgagggcatcaatctgatcgctccagacctaagattcgctctcaagaaggtcagcgccggcacatttgggcgatcggcctgtcgcaggctcacctgcgggtcggcgctgcaggctggaagctcggccgtgatgcgcgggtcgaacggagggacgctcggcggcaggccggagatgacgctcccgatgaggaccctcgccatcgcgagccagaaggtccggcgccgcatgtcgcgctgccattcatcctcgggcgcgaaggtcaagctggcgtcggagaggtggagacctgagcataaaagttagagaagtcgttgagctgatcgagtgcagaagcggcgcaccaagatccatggcgagctgcagcgcctgagcctgccgcgctcgcatcttggcaacgctcgctgcaaagattgagggcgcagtcgggcagtcaggtcctggtctgacagagcaggtggaatctgtcgccgacgtaccctcctgcgcccagtggtagagtcctgcgacgctcagcacttgcacggcctcgagcggcggctgactcgaccctgctctcgccatcatcagctcgagttggcgttcagcctccttgacgtaacgctggctggcctgctggcgagcgagctttgaagcagccgaccgtggctccggatcggccgggtgggggacgagcacaagtgcgccgagcaacgcgagcaggagaggcgaggttgggattgaaggcgtcgcaggcgatggcggtgacagggtcgccaacaaagtctgcggcgcgacgatcgacggtggaggaagaagtggctcgaaagggtagatctctgcccaatagccggcaaggctgccagagagagtgacgatcggtcagtcctggggcgcatgctcgtcggccaagcgcaagatggtgacgcacatcgactcgccgtctgggaagcggcgcacgcgccagtcttcgttcttccagccactcatcagcgagaccgagtccgccatcaggtcgtgcgggtcagcagcaacgacggcggtcggctgagaaccgggccggaggttgcgcatgaacccttggagcttggcgacaaagtcctcgacgccctccatgggatcgtcggcaggttcgagtgtcgcctggaagtcgaccgcctgcgcctttgcgacggccgaagtacttggctggcgttggccggcgtcgggaccggctgaagtcgactgagcccgtaacgacgacgacgacggccctgcctgtgccttcggcacccggtcccgcttgggcttggagccaccgcggcgcgacgcgacgtactcgcctgctcgtcgaagggatgtgcaggtcagctcctgctcctgctcggcgtactttccgactcgcgacgcacacatcccgcccgtcccgaggcactggcaggtatgcgcgagaggggtcaggccagcgccgagcgaccgggtcgctcaccgatcagcgacgtacgtgattgcacgccggctcgaggccgttgcacttggtcttgcgcgcccgacaggccaggcacgctgcatccggtcaagcgtagaaggtcggaagggcgaggtcagtgggcatgcacgacaggaagagcctcggtgcaggcgaagctcgtcgccgccacggctcctgccaccgtcgctgcgacgtcggtcgagagaagctgtcacgaacccttctttcccggcggctggctgatccgcttgaccttgctctcgccggcaggccctggtgcgagtagaattgagctcgagctgccgctgctgctcgtcagcagcgcgggcggccgaggttggtcgggcggtgagggcaagcgccgaccgctgccacttgctccggtcgagcttgcgggtcggccatcgaccgcagtagaagcgtgcggggtcggcatgctcggatgagtgtgaaggagagggcaggggcttctggcgagagctggtgggcccttggagggacggccgtcttcggccgtctcgttgttgctgctagcggcgcgaccgacgcgactaacgcgacgagccgagctggcatcctccgtcgacggcctctcccggccccggctgcccatcctcatccatcagaatctgcatctggcatcaaagatggcatcactgacaacagctgggccagctgctggccggctgggcgcaggctgagcccgcagaccctgatcaaagggagaaccgatgctgcggatcgacatgccctgccctgaccctgctgccggccgacccgccctcgagctcatcggtcgggactctctggcgtctgctcaggacgacgagtcgaacgtctgcgctcgtcctgcattgctctccgcatctgtcgacgggcgatcaatcgtccggcgtctcgtcggccggcccgcggtcgtcgttcgtcagtgattgtgacgcgctcgacgctccaggccgagggacgtggcacgctcgcctggctcgtgccagcagattcgccaggcgcgaaaagagctcccgtcggtgagcgcactccttgctgggcattgctgtcgcccgctcggaatgcgacatgtgcccgacttcggccagccaggaagctgccgctcgggctcgggcaggcagggcggcgcaggcgggggcgttcgaaggttcaagctcgctcactcggtggcggagcgctctcggccgcgatgacccgagggccttgctcgctgccgacgctcgcgaggatgaattcctgcaggacggtccgagctctcctgctggcggctttccctccgaccgaggcagcagcagggcttggccggacgccatcgtagcctgcgagcagaccgtcgtcctcgctgcagaaatcctttgactctgcctgacgagctgcgactgcccctcccttcgccgatctgcgtcggaaacgcgcaagtcggcgcgcagcgcaaggcgacccacgctggtccgccggccgatgcgacctcatttcctctccctcggctgctctccctttgatgtgcgcaacccgggccgcccgtgcctttcggccgcctctgggcgcgggcctgcccccgcgcgtcctttcgtcgcctccggctcgtttctccagccggtgcccagcgcacgcccgcccgacgctgtgatcgtccctctcacgacatccgagggccatcttttctctcgttcgccgtcgccgtccgccttcgacctctaggactcgaacaggcttctttgcgcgctcgctctcatctctcccaagggccggcccgcttcccaatcgccgcgttcgcccttgccggttgtcgaaaccgatccgtgggccgtcgcaccgcgcgcgtgcttccgccccccgctgccaactccctgccacagccgcgcggctgtcccgggcagatggaccatcgcccgcgtcgcccaccgccgccggcgcaggcagcgacgacgacgacaacgacgacgagcagccagcatctgtacgagctcggccggaacgtcggcgatccgtccccttactcggcgctgcagcagcagcagccccatgcggcgccaccagccatgacggaggccgctgacgcaggcgcgcttttggccggccaaggacgaggaggatcgctcgtcggccttggctggcccgaaccggagcccgcgttcgcaggccaccatctgcctctcgtccagcagcagcagcagcagcagcagcaggcaccatacctgccgcagccggcgatgcactcgtttggcgcgtttgatccgtcgtcgtacgcctcggtctcggcatcataccagcccgactacggcgtctaccagccatcgttcggacccggcgagagccacccaccgccgaccggacacctggccgatggctcgttcctcctccggcagcagcaacagcagccggcgctgccgccgctgcatcatcagcagcagcagccacctcagcagcatcactcgctcgaccagatggcggctcgggcggcccttcactcacaccggctcgagctccagatcgccgaggagtaccgtcgcgcgcatgaggccgatcgcgagatcacgcgcatgagcctccagggcttcgatgcccagggccgacccgtctacgaccagctggccagcgagcctgcatcgcacgaaggccgacggccggatctctacgaccagcgtacgtgttcgccacaaaccggctcgcggggtctggtcggatccgacccgctctcccgtctccgaagcttactcgcgcgcgactcctcctctttcgcagaccggcctcagatgcatccgcttctaccagcgccgaatgtgtggcagccgcaaccgcctccagctcagcagcagcaccctctgggcgcgccgctgctctcgcctcatgaccggaacggcagccttcatcacgacgtcggcgagagcccggtcgactgggcgtactctggcccggccgacatgaccggcctgttcacggcgatccgtccagagacgatggccggcagccatgccgtctcccagagcccacccgaacagatccagtggctcgtcggaggcgccgctggcgacttcagccggtccgacagcggcagtggcccgcctctatcatggtcgacgcaaggcgccgtcccagactttggccacagcttcctcccgccgtcggccagctcgtcgcaagcgtcctcgtcggtcccgcccccgccgctgccgccggctgccagcagacctggagagcgcaaaggctccgctcggccgccttctgctccgggccgcttctcgccagcgccagcgccgacaaaggtcaagccgaggccggcgacgttccctcgtcagtcgcagccggcaaagatgcagccggcaaagaagacctctggcgcgtcgtccaaagccgcagcccaaccggcagcaaagacaaagcgctacctcctgccgggctcgcacatcgcctcgtgcgccgattgtggctcgccgatcgcgcacctccagctgcgaggtgatgacgaggcgtttgccgtcgcgtgggaaggcgtctggtcgtgcaaggattgcctcgagcgcaagggcctcgacgacattactgtggccgcagagaaggtcaaaaagaagcgtagccggtgcgtccccgagaccctccaccttgtgcagtcctcgactgacggctaactcgagcgtttgcttcctgcctgctcgcagggagatgcgtgacaccaacggcatcctcgtctgcgacgtctgcttccagcctcgcgggagcggcggcatctcggccgtcgacggcaagagcaccatcgagtttgcgatcgaggtccgtctcttgcgtcgacccaggtcctgatcgtgctttgattgacgttgtctgcttctccgcacagtttgtctgcgtctcgtgcaatgacaagtacaggcgctgcacggactgcggcggcggcggcggaggacgtgtcgggtgagtctggtgggcttccttctgcgtcgtggactccaggctgctgacctcggttcaacctctgcgctctgtctcgacagcatcggcaagtggcggtgcaaagagctcttcctgcctgggcgcaagacgtgccggctgtcacgtacgtccccattacactccgcctgcccccccagcccatcagctgaacctatcatcggcaacttgcacagacgctcgcatgggcgccgctccaatggacctcggcgtctggaagctcgaggaggttggcgcctcgcccgttcgaaacgagtttatccgcctgtgcgaggagctctggaaggagaagacgtacactcgctacgcaatccccgaggtgcgtcgcctcttgcagccgcagccggcccgagagtgctgacgagcctcgccttgcgcttgtcatagatccttgaggccaaggacggctcgaagcgttccttcgccgatatcaaggacgatatcgaccagggctggccgatcaaggagaagctcttctcgaacacgggctctcgctcgaccgatgtcgtccaggcctacctcggcttgacctggtgcaagatcaagtgagcctactgttctggcacagtgagcaggtcggcctcgaggtagcagcactgacggcctcttcgcccttgctccgcgcaggtcgcgcaagaacagcgacggcgccgagctcgacgaccagcaccagccgacgtttctcacttcggatgacgcgcccaagatgcgcaagatcaacgccctcggcatcatcccgcacggctacgagcttggcggcatcctcttcggctattggaagaagtggggtgagcaccttgtcggcctctgctcagagacgaagtcctcgatcgtgtcgacgctgatccttcgtctgcccccttctcagctggcacgctgctccttaccactttccttcccttcgaggctacgaacggcgacgaccggaccttcttgacgatcggcgagtttgccgcccagagtgagttttgcctcgcagccactggctccacgcttttgtgattgagctgaccttgccgatcgtcatccgcttccagtcgtcccggagcttcaagccatcaaccaccagcgcatcattgcctatcagcagggcgtcctccgaggccagccgcaatacctgccctacctggaacacctctgggtgatctgcgacgtgcggccttggtcttccaatacgaggcacttcatccttgtagctgacacctggtctccctctctccagaacactgacccaagcatcaaggaccgcatgcaggacctgctctcgcgccggcgccagttccacacgctcgagaactacctgcggttgcacccgacggtcgacgccgccatctttaagcccgacctgtcgtacgtgccaaaggaccgcagcaactgggtcaaccagcaggtacgagtttccttctcctgatcaatgttatctcaagtacatgcgctgacccacgtctcattgcacagacgaccaacgtgagcacctgctgagctttttgctcgctcgttcgcttgctgacttaccttcgctcccgcagtctatctacgtcatggcacgctggcttggcccccgccttgaccccaaacgacttgaggaggtccgtttctgcgtgatcggccgcctctctactgcggccaaagagactgaccccttttcccacttcccgctcgcaacagatcttcaccgccgagtttgcgaagaactccaaggcgcgcaaaaagccggtcgccggcgccgacaagcaggacggatccaagccagacgagacctgagcatccctcgtggccaacgccaaccggccaccgagccgtccctcattcttcaacttgacgccccgcaccattgccactcttcctcacgaccccattctccgcatctgcagcagttacttgccagcatcatcagaccatccactgcatctcgcctacccactctgccaagtccctgcccgcctttgtacatccgaacaacactcgccccttcctttcaacgactgcctgacgtccgggtcacatgccctctaccctgtacatgacgacgatgacctcccttgatgccccatgcttagtctggccgggtgaagctgggtccaggaaatgactagagcgagaggtgagcgggggattaggggattggtgagatgccggcgcaagtacgaggtgtgtgcggatggcagagggcaagagtgacaagacattgacgactgttgaggagaatacagggcaaggagagcactgtgcagttacgaaagaagaagaagaagagagcctccggggcacgttctaggggagggaagtcgagttggcggcggcggcggcggtaccgttagagatgatgactggcggcgccgacagagtctcgttcgacgacggcaaggggagcgacgcaggcgtcgagttgaaggagccgacgtccggtccaggctcaatcggggtcgtgctagggtcgccggcgggtaccaaagcgtttacggtgatgaccggcgagagccacgactcgtagtcatccgcctttgactcgtcgccaaagattttgagcgcgcggaggagcaccttgtacgagccgttcgggacctgggtcccgttggcgaaggcgaagccctcgtcgctcgccgacagcggcacgaggttgaagccgacgccattgtcggccgagttgggaatgtcgcggacgaggttctgcagggccaggaggttgccgacgacggccggggtcaccggctgagcgcgcttaaccttgtgcatgcgccggttgtcgagcagcgagcgacgggtgacggtcggagcaaaggtcgtctctgcctcgacgaggtcgacgagcagctgggccgtcggcccgagaagacggaagaagagctcgggccgatcgttgacaaagtcaaactcggccgcctcctcgatcgggttgccgtcaaagtccatcaggaccggcgccctgaccggcaagccataggcctgcgagaggtactcgtccgtgctgtcgttgcccgaaatgtcagcttcctgcgatcagagcgaatcaatcactagggatagccacgcacgtgtcaaagatcgggaagtcggccttcatcgaggcagcgattccggcatagggaatattgaagctctggccgtcggtcgactcgagtcggacgtggccggaaaagatcgggattgccgaggcctcgaggccggttggccggtcaaaggtcacggtgacggcagcgcttcctccggcgccgacggtgacaaaggtcgagtcaaagttgacggtcgcagcgccgtcgacgaggacggcggggccaaggttaggctggacgccgttctgacgagaggggcagcgcctggattagcaaaggaagagcgtcgagaagggcgcggttgttgacgcacctcgccgaaggtgagagcggcaggggcggcgacgtgcgagagccgataggagacggtcgaactgccggcgttctggatcgtgatctggcccgatgcgacagcgccagcgctgtcgccaaggctaaactcggagggcgaaaggatcgtcttgaagaggacggcgtcgtaggcgttgataagcccgccgccttgctgagcgaccgtctggagctgcgagccaccgattgaggtcacgacggacgtcgtcgtcgtctcgaagatggccttgatgacggccgggtcgacctggccgtgctgctggatgaagagggcggcgacgcccgagatgtagggtgcggccatcgacgtgccagacatgaccgagtacgagcctttgtcgacggggtaggtcgagaggatgttgccgccgggggcggcgaccgacggcttcaggtaggcgtcgttcgtcaagccgtaagtggtgaaactggagatgaggccacccgatgcagtgttctcgaagttaaagtagccgtccgggaaggttgccgtcgcctgggcgtcggccttgagggcggcaaaaatcgccggaccatcgctctggaggagggcggcgacctggatgtcgaccgcgccgacgttggggttgaaggggccgggagcgttgttgaggactggcaaagggcgggaaccgaggtcagagacgaggattgcagccagccagacagcaatcgacgtttgagcgcaccgagcatgacctctcctccggcatcgacgacgttctgggccttgacgacgaaaccgcatacgccgcggcggaggatgacgaccttgccagcgagatcgacgtcgtgaggcgcgcagccaaagttggcggcgtcggtgagctcgagcgaggggacgtagatcgggaggggcgtcttgccgacgttaagcccgggcgtcgcgccatacgacttgtactcgtaaggcttactggcgatgacgaccaccgtggtggggataacgaggctgtcgaccgaggcgatggccagcgtgccgaccgcagtggcgggctccgagacaaggactgcgaatatgaagggtgacaggtcaggttcggatggccaaatgaaggctgtgacaagacacggcgacgcacagagaccctccaggccgtcgttgccgttcgcgagcgacataacgacgccgagcttggtgaggcgggtcgcgagaatcgactcgggagttcctgaccagccgttggcgccgccgagcgacatgttgataatgtcggcaccatcctcgtaggcccggatcatggcctgcatgatgacgtcgttctgcgacgagccgacgcagccaaagacgcggtaggcggcgagcgaggcctgaggggcgacgccggtgaagttgaggggcgactggtcggcgacgaggatgccggcgacgtgtgtgccgtggccgtcgcagtccatcgggtcgtcgtcggaaattctgtttaggggagagagacaggggcgtcagagaaaggggcgaagggggcgggacgtagaagaaaggagactaacggctcgttgttgccggtgtagtcatcgcccacaaagtcgaagcccttagtgatcttgcactcaggccgaccaaagcagccgttgccgagcgccgggtgagtgtagctgaaggaggagaggcaggcaggacgaggcagaggtaaagtcagcaaaatgggcgcctaaacacgcaagagggatggccacgcactcgacacccgtgtcgatctcggcgacgagcacgcccttgccgtagatgcccatgttgtggagcttgtcgacgcccgtcatccggtgcgggatgtacgtgtcggtcgggttgctcaccgggccggcaacgacgctgatgatgtcgtttaccgcctttggccgagggaccatccgaaccgggtagacggcctcgaccgaggacatggccttgacagcctcgatgtcgccctcggacagcctgcgcacatatgagagagcagctgagggtgtcagcgggagaccgactcccatgtcggccctgggtcgaggacgtacgagatagaggcgccaacaaagagccctgccgcatcaaatgtcgtcttgacctcgtacgggacgtcggcacgcttcatgtgcgagtcaaagtgggtgtggatgtcctggcgagagcccgagccgagcgcgacgcgtccggcggttagcgagcgtatccatttcgcggccatgcgatttgaaggactcacgacgtcccgcttgcgagaggcatcactgcggtactcaacaatgtatttgcccttgatgaagggcgactttgttcaaatggcggtcgggtggcgccaagacgtcagcgacgcgtcgacgaccgacgcgacttccctccgatcggggcttcgcgggctgaacgcgaatcactcaccgaggaggcagccttgtcagtcttccagtcggccgcactggctccggtagaagagaggacggccacagcgagggcagcgagaggagcgaagagcatggctggaaggagagggagagacgcgtcgggctgggaaggcggagggagggcgagggtcgggacgcaagagaggtcgagcagaggtcgcgcgtttgccgtcgaggctgtttgagaataataggagtcggagctgaagagagcgtcggtaagggcagactgcccagagcgtgtgagaggtcggagtgagagagagagagggagagcgagagaaagggaaagtggcaggcaggcagagtcgatggcaggggtcggcgcgtcgacgggaccagagcagcgagagacgagaggccgcgcgcaacggtggcgccagcaggaggtgtcaatccagagccaagggacgatcagtcgccacgtcccgcagctctgtgagcctgcgtaagcgaggcccgccggcatggcttgctcgaccggcgtgcggcatggtcgaggaggtcaagggcgtactctcgcttctctgtgcgggtccggccgtcgtcgtcgtgcgcagcaccgggccgaggtcgaagctcgggcagggcggcctcagctctggcagccgaattggacttggcgtcgtacagcaggccaggccagcgagcgagcgagggcatcggcacggcctgacggagacgggggcgactcgatgatgaccgaccgcagcaagagctcaagcgggggagagtcggatccgattctccttgtcaccgcactccctcgctcccgaccatcactactcccctctcccttcgcccatctcgccagccagccactgcacctacctctccgcctctgtgtctctctccgtctgctttcggagcgcagcgctcgcccgaatcaaccacctcccccggcctccctctcgaagcggacacccggctcggcgacccttcttcgcttcagctgtccgcccggctcgctctcgtcgacaatctagacgatcgcacaaggtgtgcctgagctccctcaggtcaaagtccgaaggtagaggctgatcaggtgcttgcctcaagctcgtctcatccagagctcccctcccgccgcacaccctccgacgccccgtccgcgcatgaaccatgccaaccggtcgcaaggcagcgtccagcccggcgagatctttcccggtggtccggctcgccacctgagcatgccgaccggccggcctcctgctgtagctgcggcgccatcgtcctcctccgctcgcggcccgtacgttccgcaggcccggccgcctccgcacgctcaccgtgtgcactcggctccggcaccgggctcgtttgtcggctatgcgaggccgccatccctagtgcatggtgcctctttcaaccctgccgcggcagcgccgatcggaggtcctttcggctacggacctcctcggccagagctccgggcgccagtagcaccagcgccgatcggcggcccgtttggctacggtccgcctcaagctcaactggcgcatcgccagccaaccgttcaaccgaactcggtccccgtcaggcatccgtctgcacctgcgctcgctccgctactcacgccgccaggccagtcgggcgcgccttaccggtggccagataacagctcggctgcaccgccggcgacgcctgcgcagtacggtcagcaccagcaaggcgtcacgtacgacagggctcctccgccacctctgccaccgcctcctcgaccgccgagtcctccgcctcggtctcctttctcgccgcaccctcagtccgcgctttacgcctcgcaggcgccccgcccgacttctgcgccgtcggcgccgaccgcggacgtacaagacgacgagctagcccgcgtgctcgagcttagcaaacagtcatacgagactgacgaacgtctccgtcagcaagcaaacctgccggtcgctccggtgtcagtctcggagccgcacgcagacgaggacgaggagctcgcgcgggctctggaagagagccttcagtctgggccggcaccagagatcgagccgttgccgctgtacgaaccggtcgctccttctgctgtccctcctgcggcggcggcgtctccgccccgggcacggtcgcccctgctgcaaaaggccgaccccgcctgggacttctcggcttctggtctttcgagcgtggctgttcagcgctcggcgtcggacaacatactacccgtgcccatccggcctcctcgacggacgtcctcggcgaaatcgttcggctttccgcccttggatcataccgacgactcgtacggctcggcgcgcacgctagagtcgtccagcccgctgccatcgccttcggcggcgaccgcaggacagcacctgcagccgatgctcgcaatgcgaggctttcctccaggcgggccgtcctcaatgcgagccaaccagccttggtcgagcctacaacccgctcaggacgatgttcggcggccgacgccgacctcttcatcctacgatcgtccatctgaggcggcccacggccagtcgttcgcgtctggagccgatgacctgcacgtcggcttcttcgacggcggcctcagttcgtcctttcttgaatcttgatttgccagtcgcctgagctgatcgtccccttcatctataaagtctggggccagacgacgcttcagccgccctcgctcgcgccgctctctgtccagcacggcctccctctgcctcaccactctaagggtgccgtctacgtcatcgccccttcctacccggacattctcacctcgctctttgccctttcgaacacgctcatcgagggcggcgaggagacgcggctcgcagtccagttcgtgcaaatggccgatgcagaaggcgacgggtgcgtgacgatactctggatcgagtccggggcgctcgaggacgacgacgacgccggccagccgtcgccaccgaggcggatgtcgaccgcctctagcgcgctctccgtcagctcgacgggcagcagtcaagcccgccgcccgtcgagtcatcgtctcccgccgccgctgcccgagacgttccatccgccggtcgagccttcgactggaacctactcgtcggctcacctcatcttccagcaccctgcctttgcggcccagtcgcacccccgccctcgtccaaggccgcagtcgacgctgatcgcgctgcctccttcggccgtccctctcctggcgatcggcgatcttctcgctcacctgctcgggctcacgccctacgccctttccgacgcgctgtcgctcttgtcttccgaccggcgacggcctgcgaccggcccgcagctgatgtggtcgcccgaggaccgcgaacgcttcctcgccctcatcaagcagcatacgcccgaggcccccgagacgaccggcctcgacgacgacgacgacgacgagagcgaccgcttctcaaccgcgccatcgctcaagggcagcggcaagcgcgagaaagagcgctctaaacggcgctggatcaaggagcatctcagcggcgtcggcactggctcgctcagccggcagtcgcacccgcactttgtacacccggatcagcagcagctgagcgcgacgcagcaagcgaggctgccggcgccgccaaagaagaagcaggtggccgaggtggcagccttcatcacaccggtcagtcagctcctctcccctcattccgcgaggcaagtgactaaagctgacaggcctggaacttcccagtttgcttttcccagcgatacgcctccttgagggccgatcgtggagcctcacggcttgacgagcagccggcggtcggagatcacaaagccctcactctgctgctgcctagatcgtctagatcgtcaagaagggcctagctcccggctggggacgagactcctcgtgcgccgaacgacggctgtactcaccctggccggccgttcactttgcggccctacccgcgtcatccctgcgccaacgcttgcactcggcaagggcgtccgtccgggtagccataccctttaaaaatgccgccccggcctcgaccggctggtcggaccccccccccccttgtccgccgttggcctcttgatctctgcatgaactaccattggaagcagggctgcgccgacgacttgtgttgtgcgacaaggggccgatgctgccgagaaccaagcaggcaggcagggtgccggagagtgtcggcgaggtggcgattgcgtgttgagccggtgaagtctttgtcgaaactgctgttgacagtctgcaatccgttgccgccggcggtttcggctcggttcccgcaagaggctcgagatcgccgtcccgccgaccttgttgccctttgacgcccaccctacgactttacccttgcacctagcctttgaccaggcacctcttgccacctcatcagctgtcatctcttgtgcccggcgccctgccatcgacctcatagcgttatctcacggcgctcgatcccgcctgggccatcccatcgtccttctccctccgaccgccaatgcctccaccaccaggcgctaccggcgacgatccggcccgtctaagctcgaaggatacccagggtacggatcagacgtcatgagcgacctgatccctagcgacgaggcctgactgaccccctctcgccaccactcacagccgccctcgtcgagacggcgcttgccctattgggccaggccagtgctgcgctctcgacctcggtcacgacgtcggcccagctgtcgtttgactcaaatatcatacctggggcgacgatcggcaagcacctccgacatgtcctcgaccactaccggctcctgctcgacgtgatcgaggactctacgctgccgctgctgagctacgaccggcgcgtgcggatgacgctccttgagacgagcgtgcccgatgcactcgacgcggtcaatatcatccagggccggctgcgatcgctgccgtcggatggagcttggcttcagcggaaggtcaagctcgaggccgtcacgccagaggaggtccagctggagacgacgctcggtcgagaagtctgttcgcgcttgcaggccgtcgacgcgctgcccttgttggatcgtcggctctgttctgaccggcctgcccatttccacacccagctgtggttcgtctcgctccatgcgattcatcatctcgcgagcatccgggtcatcgctgtcggaggtgcgcgacgacgctcagcctttgcctgccgtttgcgagattgtcaagctaactctcgctgccttcacccgcgtccatcccgcacgcacaactcagagctcgcacgtcctgtccgagtctgtgcttcagccgtgccgacgctgatcagccttacctctactcgtcccctgcagaaactctcgttgccctctaacttcggccttgctccatcgacggccgtcagtcgccaggtctcggaccccggcccggcaggggcgcaggatatgacgcccggcaggacgtcgtcgtcaaagctttgatcgcgctcgaccgcttctcgctacaaatcacgccactcgcgcggtcaggccgaaaacgatgaggaccgaccgacacgcctcgagacaagcaggccgggagcgtcgctgatcagcacgcgcctgtgccaacatcgtcatgccttcagaggcggcgtccagtccccgtctgtagcagcagcagcgttgcagcagccagggcatccttcgaagcgcgaccccttttccgcaacgacacccaagagatgagatgcagccgccttcttaagcaccttctgcgccttgatatggtcggccgatgtgaaccgagaaggaggttgcccaagtcgatgctgtcgttgccgttctcgccgttcagttggccgttgcttgccgcgcagcagcaagtcggccggctcgaccggccaacctgcctgttgagtcaagaagggctgctcccgtccaacgacgacttagaaagacgccctcgacacccgaaatcggcaaatccctccctctccccccttcagcatgtcgtcagacccgccgaaaccgctccatgcccggacgccgctcaactactcacccgtcctcagcgcgaaggccggctgcaagtcagtgcccacactgctcgaggccggcttcggcagagggctctcgtctcggcatggctctcgagctgactggagctcgtcctcttctcagcgtctatctcaagctcgagaatgcccagccatcagggtcgttcaagaaccggtcggtctttgttgagctcgccgaccgaagctcttctgccctcccccccccccccctgatctcccgctgatcatacgacccctccttcgtctgaccgcagaggtgtcggcttcctcgctcagcgatctctcgagacctttggcgatcggacgcacctcatctgctcctctggcggcaacgccggccttgcctgcgcctacgcggcttggtcgctcggcgtcaaatcgacgatctgcgtccccgttacaactaagcggtcgatgatcgaccgccttcgatgctacggaagcgaggtgatccagggcggtgcccactgggccgaggcggatcgaacggcgcgctccttggtcgctgaaacggaaggagggtgagccggctcgtccatctgcagcgctgctcgtcgtgcccgcgcgcagctgatccacgagatactgactcgacgcagcgtgtacgtgcccccttttgattcttcggtcgtcgtcgagggcaactcgtcgctggtgtacgagctcaaggaccagctcgacgagcacggcgtctctgatctcgcagggatcgtttgctctgtcggaggcggcggcctgctcgccggcatcctccgagggttggaagagacgggtctgcaaggtgcatcggctgttggctggctgccggcgcccttctatgctccaggcaaagcgcatggctgagcagttccgctgctactttacgcagtgcctgtcgttgcgtgtgagacgcgaggcgcggcctcccttgcactttcgctctctcacgaatggtccagcgacgatcgctcacccccgggtgaggccaagatcctcgcgctcgatggcatcaccagctgtgcctcctctttgggctcgacgaaagtcagtcgggaatgtcttgaccgcgcgctcgcccacgagtcgcgaggaggggccgtcagcgtcgtcatggaggatgagcgctgcgtcgccgcaatccggacctttgccggttcgtctcttctatcctgactgcgagtgcgtagcctgcgctaggtctgacgctggatgcgcccttcgcagatgaccacgcctttctcgtcgagcctgcctgcgctgcgtcgatcgcgcccgtctacgcccccgtcatcctgcgcgccgccctacctctggcgtcctttgcgtcgccaggactggcgccatccaaatcggcaccgtccctcgtcatcgtcgtctgcggcggcaacgccatgagccaagcgacgctcgagctctgggaggccgactttgcgggccgcgagcagggcgagatccgcatcaccagcagccgcgggcaggtcaccgtctgagccgctcgggttggcctatctgcgcaatcacgccacggatcccctagagcagcgacatggactgcggcattagatggcgtccccttgacacgaggagcgcggagtagtgatagggcctgggttaattggccgtgcgagcaggcttcgcccgtgcgtccttgcgctccaatcctcacactgccatgtcgtccactaccgacctcgaccgttgcttctgacagcagatcgactaacctacgcgccacttctcgctcgggacttgtggcgttcgacagaatactacggcgtcgtggtctcgcgccctctccaatcgcatctgaccttcgtcaaccgcatcgaacgtgcaggcaatcttctcccgctctaggccggcgagcccgcttgaacgtgatccgccggccttggtggcttgcccgcccgggctcgctgcttgcacgaccttgcaccggccttcgcacctcctccaagaggccaccttcagctttgcggatctcgctctgcgctcaacccctgatccgcttaccaaagattgcggatctcttgcggatccgcagagatcaggcttcggacgagcttttcgtacgcgaatcggggtcctgccaaggattcgacccttctcgccaaggcggtcgagaccgattcggaagcaggcgactcacacgaccagccagcgtcgacgtcgggagctttgcatcgaactgtaccctcgcgcccaggcttgctcgcgctcctgccgtcgccgtcggaacgttcgttcgcctcgctgaaaagctagcaaggggctggctggctttaaagacctcgagaggcggaccgggccacactctccttcttccgcagacagcagacttcctccttcgcaactcaggccagcttcaaccagcacttttcgtccaagcttagccgacatgcccattcctatctggtccgccttcacgccgcgcgagcgtcgcaacatgggtacgccgaactccttccgcccacttcatatccgcgaccggcactgatgcgaacgtcacctcatccttcctgacaggcttctacgtgcgtctcgctcttgtctgagcacctagcaagccccttgtctgacctctagctacccctccagatcggcggcatcatgctttacaagctcggccttgagtccttcaacggctcgattgtgacgctcgcgaccgaccgctggggcggcggcagcacctttgagaagctcggaatcctgaccggcatcaaccaggttcgtcccctcatcctcttttactgactgactggcgctgacgtctatcgctcgtcttgacttaacaggccatgcaggtcgtcggatccatcgctatcgcgcccctcatgaagcgtgcgtccttctgccgcatcttccttccttgacgccggcgctgacgtctcttgtcccaacaggcttccctacccgctcggtcctttcgtccgccatcatcgtgttcggcctgatcgtcacgctcttcctggtcatcgacgccgccaccggcggtaagatcaaggcgacgacgtcgaacggcaaggtcaagtacggaacctgggcgcccgatgccctcttccctcgtacgtcgacccctctgttcactcgctcaatcggacgtcttccgctgacctctactctcgaatcagtctacgcggtcagcggtatcgcttatggtatggtcgagcttatccggcgtgtcatcccgcgagagtgagtgctagtcttgttgccgctcgcctcagaaacacggaaactgacctctcctccgtcaactcctcagcatcgtcggcggtgacgttcgaaagctgcgaaagatggacgccgttgtccacatcctctacgaggtcgccggcacctccggctccttgctttcagtcgctctcatcaaaaagctcggcaacaactacagtttcatcatcacccctcccctgttcatcctcgccgccgtctcttggcgcatggttgatggcctcggtcaccagactgccgaggagcagcatgctgctgccggtggcctcaaggaggtcgagttcaagaaggagtcgtacgctcgcggcctcgctaccggcttcaaggcgttcggccgggccacctacaagggcgcctacatctgcttcacttcgcgcaaatttgtctggcttcccttcgcctactcgtgagttgtctcccattgcctgtttcgcccgccagcaccactgacgccttctgctgtctctagcctcgccctctacggtcaccgctacctcgagaacggaatctcgcccgcgattgccaagcgcgtcatgatggactcaagctattcgcagatcatggtcacgggttccaacgccggtgaactgctcggtgccatgatcgtcctcgtccttggcagccggtgcgtcgccccgttgcgcagctcacccgacactctctactgacctacctacgcatcgcctattgcctaccagtataccgaccccgatgcccttccttcggtttgacgccctgtcgctcctcatcgtctgggtcctgccttcgtacatcagcaagattgttcccaaccagtcagcctacgcttggaagattgccggcatgttcgtcccggtctcaatcggctgggccgccggcgacgtttcgctcgccgccttcatccaggcctcgctcgcccgcatggagtcggaggacactgaggtctcggccctcggcgccgtcatgtcggtgcgtgctccttactctcttcgcgtcttccctgccatggcgctgatccttctccttctcgctcttcagttcctctactcgacctacatcattgtctacgccgtcgccggatcgcttctcggcaagtacgttgacgcccagtacaagaaggacaagaacatgaaggtcagtcgccctcccctctgtcaacccacccaggactgcacgagctaacccgtgactcttctttcttcagaccgtcctcaccaacattgccggcgtccacttcaccgtcctcgctgccgtcatcatcgcctcgaccttcatccccaagggcgccgtctctttcaacccgacgctcatcaacgacaccgacgtcgcgggcgagctcgacgccgtgtcgggcgtcgaggtcgacactctcaagaagcgcaactcggccggcggctctgatgacgaggaagagatcgagaagccggtcaagtcgaccgatgtcggcgccatgttctgagcggcttttccacttctcctccttgcccctttcctttgccctttttggcggctcgcactgtttgtaccccttcccttgcttgactctcttgtccaccttgcccctcgttacgaaatcttctcgcaccatttttgcacgcacttgcctgccaactgtctgagataatgtcttgtcttccctagaccctcctcgtttggctgtcagtgctcgccggcgagctgcccgcgagaacattagtcgacgggtgtatgctacccggccgcataggtttgcctgtcagttgcgtcagcttgatcgatgtttgccatcgttgccagaaggatcgcttgcttgctcttagagtgcaacagagggcgagggctgatcgagcaggtttcatgctgcgcgcgcgcgggcccggtcggccggggcgtgcggtggcctccaccttgtgacgacggcccttcaaaacgaggcggcgaccgcagggctgaccttcttctcctccctcaaacgatcattaccctctcttcgacctacagctcagctccagcacctctctcaccatgtcgaccacccagaagaagtctatcctcgtcatcctgacgagcgccgacacggctaccgtgcgtgcctgcctgcggacggcctccggccatcgccgctctgcgctccatctcccccccccccccccggcgatctgacacttctctcgtcctctttctgacccttgtacatccagaacggcaagcctacgggtctttacgcgcccgagcttgctcatccctggcttattctgaaggacgactttgacctcacgtatgtctcgcccaagggcggcaaggcgcctatcgacccagcctccatcgaggctttcaaggacgacgagggctgcaagaagttctttgccgacgccgagattcagaagcggatcaacgaaactggcaagctctcggacgtcaaggcggccgactttgacgccgtcttctacccgggcggccacggcccagtcgttgaccttgcctttgacgacgactcgaagaagctcatcgtcgacttctactcctcgtcagtttttcttcttagctccgagactaagaccgagagcgagacatcccgttgctgacgttccttccatcttcctgcagcggcaagcccgttgccgccgtgtgccacgcgcccgccgtcttcgccaacgtcaagcttcccgacggctcgcccttcattgccggcaagcgattcgccggcttcaccaacgaggaggaggagcaggcccagggcgccgctctcgttcccttcctgctcgagaccgagctcgtcaagcagggcggcatccacgagaaggtcgacgcttggggagtcaaggtcgttgttgactcgtcggacgatggacttaaactgctgtccgggcagaatccggcatccgctggcgtacgtcgctcgtcgctcgtctcagctgtgacgtcgtaccgttgctgatccgctgccggtatctcgccttgcctcagcccctcgctgagaagctcaaggagctccttgcctaagccgcccgtgccttgcccccagctgtagccctatcgatgaccctcttcacgacacggtccaagctcatccgcaagttgcactttagttcggagtgtccaattgctgctgtcgacgcgagcaaaggggcctcggtcagcacgttgtcctaacgagtcaggaaggctctcgcgacagaccccaagcgacgtccccgccgagcgtcctctagcctgctgctcgtctcctgtcaaggcgagccagcccggagtgatccggttgccctggtcgttggcgatgatctcgactcggcccgcccgcaagacgcctgtcttcgactgataggcggcctggcccggaccgaaatcgatgcctgtcagagcatcaggtatgaaggagtcagatgattctggaagacgatgacgagatggccagctcatcagtgcacccgcctacgacggtcccgaactctacgggtcgaagggaagacggacgcgagcacagaggagcgtcagaaggaagcctcggacaagtcggacaaagcgcaaaggatgactgaccgagcgtgcttccgccgttcagctcaaatgcattcgacgaccacagatgacacagaggaggtccagcgagggcgaaggcgaagacgaggacggcggcagcaagcaggagggcaagcggggtgagcggggatcgccggcgtcgggttcgagcgacgcttggaagctctgtcgctgtaagaagtggcgatgacgaggtcatggcgaggaggagagggcttcaagagtctagctgtacaaccggatgtcttcggtctcgggtgataagaaggtgcgaagtgcgagctcgcctgtcgctgccagctcacgcgcaaaaggggggtattgtggggctccaagaagaccatcctctatttctctgtctcgacggacgacaacgattagatggcagataggcatgaatagatacagcagtatggggggagcaagaggctgggtaggattagctatcaaagtccgggtggggggagagtggaggcgagtggagttcgggccggctcgttcagggaggagccacggccgacgtcgtcagggcagagaggctctagtaggacgactcgacgagctcgagctggccacggatggcaccagcggtgaactcggcggtgtgagtgtcggcgaagaaggctggggggttggcctcgatctgagcgagcgtgaagccggtgccggtgtcggctgagacagacgaagcaatcgacgagtcagctggaagtccgacgagaagagggcgaagggctttgcgcacctccgttggcaacgatgccggtcgtgaaggggcccatcatgcaaccggcgctgacgcgacggccgaactcgttgatgggcgagtcgccggtcgggttagggaaggcgaggcgagggggtcccgagcggccgaagggagcctcgtgctggaaggaagaaggaagctggtcagcagagagcgggggaggcgactgagcagacaaagtgtgactcacgatgtgggtggccgtgcgggcaggcgacgagtagttgccgctgatgtaggcctcaatgtggaagcagatgaggtcgtccacagcgttgatgccaaacttggccatgccgtagccgccagcgaggccggggaccgacgtctggttggcgttaatgatgaagtcgggcgagagcttggccgagaaggtgctcgtgaactcaaaggggaaggccgagatgagctggtggttgtcgtcgtggtggtcgtcgtggtgcgactcctcgaccttctcctcgtggccgtacgtgcgcttggcaggcgcagcgagggcgagagcgggaagaaggagggcggcgagggacgagacgagcatcgttggatgaagtttgggtggggtggttgggggagtgaggatgaggttggttgagtaagatgcgaatgagatgggatgagggaagcgatgggcaaacgtcttacccttctccaggctttatagcaggccgccgggttgagtgccaagccgagccgtcttgatcaggaaggcaaggtgctgcgagattggagcggtccgtcgggtgttgtgacagacaggaagggggggggcgtgcgaaccaaagcgccgagctcatcaagaagcccaaacgccggagagtcttgggacaagcgaccgatgacggcaggggctgcggcagtgcaagggacgccggacctcccaagagctgcgagaagccctggcgaggcctgctggcagcaagaccggagctgcagatggtcagcagcaggagagtctcagccaggccgtcgagcgttggcgagcgcttgctctcctggcccatctctgggtcaggcagcgtcgctcaacaacctgccaggagagatgagagagagagggcgcccccactttgatcagcaagcagagtgtgtgtgaacggcggccccgatccagaaggcagtcagccttcaacaggcctccgtctgttcggctcggctttggctgggcggtccaaaggggcatctcgatcgctcatcggcccgacccaagccttttcgtgcggcggacgcagacctcgattcgatgcgaggcagaggttgattgccccgacggcgtcacgcatgccgtgccggtcagggcctcgctcttgttgacctggaggacgctcgaagaggcaagtaagagaagtgagagagagccgggccgagccgccggagcaactggctgacgggcggcggtgttgacgaagcgcagggccaaaagcaaaacgagtttcgaacagcgggcactcagggcgggagccgaaggaacggccgtccacgctgctgcgaactgtgtgaaggacgaggatcgcatcgtcgggctcctggttagatgaggcagtcggtcgtcgtcaggcggctctgtcgtgggccctttccggacgaacgagccacccagatgttgaggttgcagaggcttactgctcgtccattctctcggcgaccgctgcagaacgaactgcattcaagcgtcaggcagtctgacgtccttcgacagcctgtcgtcgtccacgtcctcgaccgggcagcagcgctcttcaaaggagatagagctcttgcggcagccctgaccacgttgactcgcagctgcgccctttccgccgagccgccgccgacctcggtcagggccgcccgacggtcaccctcacgccaatctctccccctgttgcttgagcaggccctcgtagcccatcatggacggcctctcgccgttcaacttcttcagcgacgacgcctcgttcgactttcatcggcagctcagtggcggcaaccatggcgacaggctcagctcgcacacgccgccttcgaccgcccagctgcaagccctgctacatcactcgccggtgctgcgacagccgacgctgagcccagaggacctccaacagctgtttgcccagcagcaagccctccagcagtcccagatggtttaccatctgcagcagcagcagcagcaactcccgccgcagcacctccagcagcagcagcaaccacggcagccgcagcagcagcaacgtctgccagcgccgttgccgcctcaggttccggcgccgcagccgagcttcagcagtagggctgaggaggctgtcagcagcctgcttcgagcgggcgaggcgacgcgcaagcggcagaagtatcagcgctcccggctcggatggtacgttcctccgtgctaaggtccggcaggcgagtcacatgctgacccggcctcaccgaccgcgtcgcagcctgacctgcaagtcgcgtaagctcaaggtccggccatccttttcgttgatcggtctcatccggcaggcacacgcgcggacccaactgacgcgcttcgtctccgctcactgcagtgcgacgagcaaatgcccgtctgcaaccgctgcacaacggccaaacgtgactgccgctggaccgagcgtcagccgccgtacgagacgtcgccggccaactcaaacggccatcctgcctcgtccaagcgcagactcagcgagtcgagcaaagttgaggatggctcgcagcagcaacagctgcaggatcttcagcccgtcgcctcgtcttcgcgagtgactcttgacgatctgcctgtcgtgctgtcgcagcctggcagcgcgctcggcaaacatctcttctctcaggcatccgccgcccgtcggccgttccagacggccggcatcgaggcagctcgaccagagccgccgccctttgtcgatctcgttccgccagacgcaaagctggccatcatgacgagcccgtcattcctacatccgttcttcccgtcgaccggcgagtcccaataggggtcgcagcgcgtcgctcgagccgcaggctgactctgtcgttgacctgaccaaccgcagaggagaagatgctcattcatcgtccgtccagccttcctggcctgccgggatagccagagacgttcacctgatgtctgccttcgtccctcgcgcagactaccttcaccacacgacgcgcatcatcgtcgctcgggactcgagcctcaacgtgagaggttcctcagggcagctgacccgactcaggacctcacacgacgcttctgtccccgaacagttctgggtgacaaagcacggcccgctcgccttttcggtcgccaagggttactctcccgcgtgcgatgcgctacgcaactcgctcctgctcgtcggcgccgtccatctgcgctacctctcgcagacccaaggcgatccgggcgcagtgacccgcttgcgagcacggaccgtcgggatgatcaagcaggtcgtccagacgggcgaagcggccgaggacgagctcctgctgtgcgccctgctgagttgtgcagtctcttgcgtgcgtcggcccgtcttacccaagtgctctttgaccgaccaaggctgatcctctgtgaacccttcgccaatcaaagtcgctcggcggcgatgaaggctggcaagaactcttgcagctcgcctcgcagctcatcaagcgcaacggtgggccccgtgccctgctcgagcgggcgccgcgcgaccgtatgagcccgatccgctttgtgctcgagcagcttgcgacgcgcgaggtttttggcagcctgacgactggcacgacaccgacattgctcggcgagggctttgcgccgtggctctttgagatggagaaatgtgcgttaccctcagtgctggacggccaggagctcaaggctgaccctgctgcccttgccttatcgcagggagtgcctccgaggaggaacgtgccagcatcgagatcatgtttggcctttccaggggcatggtgcgtcacctgcctttgtcgcgattgcgttcgacacctgaccccgggccgctttaacaggtcgacctgattgctcgggtcgcagcactcgtcgctcgcaagcaccgaactggctacgtcgtcttcgaggacgaggacctcgacagtgcctcaccagcaggcgagagcaccccttatccaagtctctcggccgagcaagaggtcgagcgctccaaactcgaggtcgaggcgcgcaacacgattctcgaactccagatctggcagacgagcgaaaagttctcgccgatccacccccgggtccaattcggcaactctgcacaccgcctggcgatgtcgctcttcatcttgacaaacgtacgtggtcgcacgcctcgcaacatccgccgctgagctgactcgactcctgcctgtaacaggtcttccgagtcgaccgctccgaccctcgcctgaccgacggcgctcgggccatcattgaggtcgtcaaggcggccgcgacgacctttccgaccttgacctggctcacctggccgagtctgatcgccgggctcagctgcgcgcccgattcgcgggaggatatccgccagctcgtctctggcttcgggtacgtgctgctgtcttctctctctctctgcttgatgatgcttttacttactcgtagggccctcggcagcgagcacgcggccttcgacaatctctgggcccttacggtcctgaccgagttctggcgccggctcgacgagggccagtcgccgagcctgcgcgagatcatcgacgccctcggcctcgaaccgttcttcgattaatgacgaggcgtttatggtcctcttctctcagcccaaatgaaaaggagatgctcagagcagtcgcgaccggaacaaggcgcgagcgagatgagctacgcgccctggaccgagaggcacactgctgcgcgcgactttgcggcctcggcctgaatttcggctcagctttcgagcttgcctctcgacgtcgaccaccgccgcctcgcctgctgcctctcgctcctctcatcgctccctctcccggccgtcctcctgcgcgacgtcgcaatgggcttccgtcacgaggcccgccttttcttctggggtgaacgcaagaagttggccgaggaacggcgcctgatcgtcaagatcgactgtgcggtaagtcccgccccggcgacagccgcccctcgcccttccggctcgtcctttggggccttcccgactgtcgctgttgagccaacgctcacgactctgctactgggctcctgctgtatcaggtcctatcatacatctgcctcaactgttcgttcaagtctcctcacgctcgaaggagctcagctccccggacccggcccgcgttcgcgcggctcggctctagcctccactttccaggccgacccctgccctcatctttctctcaggacgatcatgctgacgtgcttctcactctcggacagactggtgcaactacctgtgcgtgttgctttccacaggaggtccgctccgtgtcgctccagcccagccgagccgagcgcggactctgatctgctccggtcgcgcgtcagccaggaactgacacgacctcgcccgcgcgtctcgtacgacctgcttgcttgcctgtcgttcgacctctgctccactcgcccccactcggctggtcaatcagcgaccgcgccaacctagccaatgcgtgagctttatggcgagctggtcttgctacgcactgcgagcctttgctgacaagagtggagctcgcctcgccgccgccgctgcgcttagctacgtcgtgcgtagcttcggtcgtcgccagccccatgccatcagccaaagattgctgattcgcccctctgctcgtcgacagactggaatgaaggaggacgtcggctttgtcggcaacgactacacgaccgccggccagctcttcaccgcgggctatatcatcggccagtggccgtgcgctctcgcgctctcgtccggtcggatccgaccgcgcgtcttctttccggcgatggcagcctgctggggcgttctcacgctcggcctcgcgtttgtcaacgacgtcaaggccgtctttgccatccgcttctttcaggccatctttgaggccagcacgttcgctggcagccactacctgctcgggtcgtggtacacagctgaggaactcgtgagtcatcgccgccccttttcgactgtccccaacatgacatcagtctgatcgtgcttcattctcctttcagggcaagcgctccgccatctttacgagcgcagcctccgtcggcaccttgttctctggggtcatgcaaggtgccatccacaagacgctcgacggtgtccgcggctgggctgggtgcgcgctcttatcggccaggacagcagctcgtctctccactcgctgactctcttgctttggttccagatggcgctggctgttcgcaatcgactttgtcatcgtgcgtcctatcgctcgtgctcccgcgcgcgtcgtgctgatccggcctcatcatccttcttacagaccatggtcgtgcgttcgtactcctactctctcaccagtcaggcgctgattatctctgctcgctcctccgatcagatcgtcgtctacggctatcttctttttcccgacacgcccgagtcgacgaccgcctggtactttacgcccgaggagcgcgcgctctgcgtctcccgcctgccgcccaacgtcaagcagcaggtgacgtgggcctcgctcaagcggacaatccggagagccgtcgtcggttggcggttttggtcgttctcgctcctcttcacggtcagcgccatgatggaggcgtttggcatcttctcggtcagtctctccggttcactcaaagtggtgtacggaagctgacgcgtctggctacttacatcaggtcatgccgctctggatgaaggcacgtttaactctccgtctttttgccgcccccctttcctctcgctcgtcaacgaggcttatctctcctcccacccctttgacagacggccgtcaacccggacggttcagcagcctacagtctcgaacaggtcaacttttacccgaccggcatcaccgccgtgtcgatcgtcggcaccatcctggccacactctgtgcgtcctcccctttgtgctgcctcgcctgcctgactcacgatccttcatttgagtcgagtcgcagactctgactacgctagaaaccgcttcatcgtcaatccaatcatggccgtcttcaccctcgttccgtcgatcatcctcctcgtatggaacgtcccgactggcgttcgcctcttcgcctactatgtcggaggcgtcggctacgccgggtgcgtcgtcgtatgcaactcattttcaactttccgcgctcgctgaccaggggcgatcctatctcgcagccaagcgaccaactttgcatgggccaaccagttgatccgggacgacgacacgctccgggcgctgacgctcgcgtcgatgaatctgtgctccaatctctggcacctctggtactcgcgcatcattttcccggtcgtcgatgcgccccgcttccggaccggctttatcgtgcggtcttgcgcgtcggggctacacacgcgtcctcgctgacacgtaacccggcaccctcaggccacgatcgtcacgggctttgtctcggtcgccatcgccgccgtcatcgtatttctcgagcggcgcgacgtccgcgagggcaagattgaagccttcgtcaagcgtgcggcttcgcctgggactgaggcggccgaggagacggacggcgatgacaaggccagcgtccgctcgaccagccgcccctcgtagtctcccattcgactttgtttcttttcctcctcgttgtattgcgacgccttgccgtctgcctaacctagatctgatcacgatagatgtcgtctcaccctgctttgacccggtagagtttgccgacccggcttgtcaacgaggcttttcaaacgcgccctgcctgctctctgaccacgtccagtgcacctgttctcaatctcaggtacaagcgcgcgacaaatcaacaggaaaacacatcgaatgaggaggcaaactcgaaagggggtgggagtagggtgggatgcaagtgggaagcgacccaggtagaacggagacgacagcaggagcgggggcacgctctactttgccgaggacgagaacttggtgaccgacttggtgccctcggagatggcgtgcttcgagagctcgccggggaggatgaggcggacagccgtctggatctcgcgcgacgagatggtcgacttcttgttgtaggtcgagagcttcgaggcctcggcggcgatgcgctcgaagatgtcgttgacaaacgagttgaggatcgacatggccttgttcgagataccggtgtcggggtggacctggggaaggagggggttccaggggtcagctgttgaaggaaaagcaaggccacgcgagctccactcagacgcacctgcttgaggaccttgtagatgtacgacgagtaggtctcgacgcgcttcttgttcttcttcttcttctcgccgtcagccttgggtgccttggccgtcgacttcttggcaggagccttggaagcgggagccttctgggcaggggcctttgaggcaggagccttggaggcggtggtcgacgcgggcttaggtgccatgatgaaagttttttgttcgagggtgggagggaggtgtaatgatgatggaaggggaagaagaggagtcgtgacggcgcgtctttgagggatcgcgcgccgctgccagacgcgacggacgacgcgacgacaggaggcggagcctgaaagttgatcagtttgccgtcgtttggtcccgcgacgtggcaaggtcaggaagactgatgatttgctggaggtcggccactgcgtctggtggtgttgcagcgggcattcccgtcttctccggaaaatctcctttccggcgcgcccggttttggtcactcaggggtaggtgggcggtcaggatcagctccgccattgttgcgacaggaggcgatacacgtagacgattgaagagatgaagggttgggttcggtgggcgacgcgccggggccgcctcaaaagaacgcgccgctcagacctctttccctctcctcaaccaccttccaacctcacaccctcaccaacccctcaacccctcttaacaacatcatgtcttccggtggcaaggcttcgggcggaaaggctggcggaaaggtcggcggtgaggccgacaagaagtcgtcgtcgcgctcggccaaggctggtcttcaggttcgttgccacttcgccgtgctgtctgccgttgcgtcctaaccgctgaccctcctccttcatccttgacagttccccgtcggtcgtatccaccgtctcctcaagaagggcaactacgcccagcgcgtgggtgccggtgcccccgtctacctcgccgccgttctcgagtgtgcgtgcttgcaatcttaatctccctcgctggtcccttcgtaccctgacgctaccctctcttcccccttctctatctgcagacctctccgctgagatccttgagcttgccggcaatgctgcccgcgacaacaagaagtcgcgcatcatcccccgtcacctgcagcttgctatccggaacgacgaggagctcaacaagctcctcggtcacgtcatcatctcgcagggtggtgtcctcccctcgatccagcccgaactcctccccgccaagtcggctaagtcgaaggccaaggccagccaggacgtttgatcgcagccccttctttgcccgcggtctccttgccttacggcagatgaaccgcactagggcacccttccaaccccctctccccttttcgagtttgccctctctcttgatccgatgaagtccctgccttccacattccttgtggcttgtttgaggagagtgtgcgcttgagcttgatccaaagccctccccctccgacacgcacgcttacaaatcgctcaatggatattgaggaagcgagcatgggaacacaagcagacagtttggggagaaagacgaaaacgaaagcgaaagttgaaagaaggccggacgagagtctcaggcccgaccctgggcgacgagctggacgcactcgacgagcgatcggtagagcgggttggcgagaagctcgccgtgggtcaggccggcgacggcactcgcgcgcgcgagcggggcaccgtcgttctcgccggcgaaagcaggagcgtggcatgcgagggtcgggcctacgccggcgacggggccaccatcgagtgcagcggttgagctgcggacgatcggtcgactcgagggagcgtccgttgacgacgacggctgtggcgacggggcgtaaggcgcgagcctgagcaggttcgagatagaaggcagatgtagagcttcatctgccgatcgccgacggtaccctcgacgacggccgctacggctgcttccggtcctactgctggtttgactgctccggcgcgaggaggccgacggtggtgcggtcgagccctccccttccgacgacgaggacgacattgccgagggcgagtcgtgcaaagcaagaggcgcagtatcggagcggacggcgacgattgaggcctcgctgccgaccaggctgaccggggcgaccggtgggctctggccctccttcgagcctgcgatgccgctggtcgctccgtcttgggtcgaggaccggcttcgcttgcccgaccgaggccggtcgctatcgagtgagacggccgaatccttgcgcttcctcgtctgatcggtggcattgtcttcatccgggcggagtcgctcccagacggccggcggcggaggcggcagcaggctagcaggtgactccgatgccggcgtcggacggaaggcggcgagcggcctgggaaggagcgagcctgggagcgagggcgccgcaaacgaaaggagcgacgacgcggccgagggaagcgaggactgccgcatgggtaccggcggagcggggccgagagggtagtcgtagcgcccgagaggtcgaatgggatacgatgacgacatcgggacactggacggcgccgacggaagacattgctgctcgagcagcggcggagcgtcgaatggccggccggcgaaagggggcggttgagcccagtgctgctgctgcggacgcggaggttcctgcgcccagggctgaggttgcaccggcgcgctcgactgctgcagctgagcgtagaccggatgatgggcaagagagccagttgaagccgagggccgattggctgcgtcgtgcattgggcgcgtgtcaccggctgagatgaccaggtgaagggagagcggaaggcgtcagttgcggatcgaggaaggcaggagggcgaacttacgttgactgcggcctgcgctagcctcgcctgcgctcatgtcctcagcgccatcgtttctgccctgaccgtcgtcggccgagtgccgtcggccactcgtcttgctgcgtcgctgcgcgtctagacgctcgacgtcgtccgcatcctcgagcggaggccgtcttcggtgatgcgagtgtgattgataagccgcacctttggcagggaagtcgtgcgggtacgcctcgccgtcgccgactcggtggacgatcggccgccggtgagggagttgcttgccgaccgtcgacgacgagaggccgccggcggtcgggcgggcgtacgcagtctgggcgaggctgtgccctgcagcagcacgagcgacagcgtcggcgtgaaggagtgatgaggatagcgcagagtctgctcgggtgcaaggcgaggaaaagggagggcgcgagtcagtgaccgacgtcctattctcggctgcgcgccgggccagaaacagctccgctctcgcaaggaggtcaagccgggcccggatcgggtgtccatcgcacacgcaacaggagacctgatagcggaaacgcaccctcgacctcgttgctcctgtcaaagcaccgcccgccccactcgagtgccttctcgagcgcatcgggcagcctcggccgcttgccaccgccggcgaccgcgggcgcgggggacgcgaggagctcggcagcccgggcccggtcgaccgagacgtgcttggcgatcgtccggcgctgccagacctcgccggcgcaggcgtacgaggcgcagtggcagtggtacgacttggggggcatcgggttcggtggcggcgggaagggggaggcggacgttggaggtcggggagagactgcgcgggagctctggcgagtcgctgctgttgggcgagggcgagttggcgggcgtgatggacgagaaaagagaagccggccgagaaggaacgccgagtaagatcttggtgagaggggttgacgaggcggaaggattggttcgggatcggaaggaaagatggagctgctgactgcggagacgttggcggtgaggtcggccttcgaatggttcgagggtttgtgtgccgcggctcgaggttggcaacgaagggaccggtcgagaggagagagaaacggccagacgagcccggagtcgtcgaggtgatgctgagggcaagaagagtcgtcgatggatgatggttggttgcagcgagcgaggtcgggcgggacggcaggcgcgggaaggcgagcggcccagattaggtcgtggtgcggtgcgtcgtcgagcgggtgctcggtgctgtcggcgggtccgcttttgggttcgtgccgaaagaaggggtgacggggagggagggcgacggcgagcaggggatgatggcggagcgctctgctgctggcccgcgtgctgttctgggcgtgcacgcagtatgcacgggctcgggggctatcttgaggcggaaagaagcgtggtgtcagctcggccgccagagagagacgagaggccagatggtggtaagggcgagcgaggtcgaggtcaggacgaaagcaggcaggtcgcctgcctcgagcatccttcgagcaggtcagcctggcagcagccgaggtacggtcgacctgccccagccatggtacgacgacgaccggcatcgtctctggacgtatctattcctggccggccggaggtgtcgtcgtcgtcgtcggccgtcgtgcaaggccgccgcctcgcaagcccgagcccagaccgaggtcgcgctccccagaccggcccaaattggggtttgacacccatggcccaccgcgtcgtcgagtgggctgcatctccgaccaacccttcgacagcgtagggtgttgctccttcgtacagaagccatcgctcttatggaatgcatgctgagcagacactcgcaaggtctacgagagcaacgacggtctgattcgattcttctgtcacccgacccgccgccgcgcagcagattgcgagacgcgttgccggcctgtcaacacacggcggcgcgccactcaacctcgccctcgccgccgccgtcgaccacctgctctcgcccacagccatcgccccctacccgcccttccctacgcctcagcccaaagttccggtcgcttcctcggccgcgtcctccctcgaacgggaatctcttcgaccacacaaccgacaggtgcgcgccagccctcaccggcctgccgtcgctccctcctgccttgctcgagctcaccagccagccagccagcccgggaaaccctaaaggctctttggctctcctccctccttctctcgttcaaccaacccttcccactctctctccacctcacagccatttgaccggacgcgcgcgcgtcttcatgtcgacctcggcgtccgcccggcaggcgagcccgcgcaagccagcgctcggcgagtcgaccgcgcacaaccggcgccggccaacgacctcgacggcgtcctcgcctctgaccggcagcctcggcagcaagcagcagaaggcttcgccggcggcctcgccgacgaagggccgcctgcggcgagtcgctcccacgggcgggtcgggtcccggaggcgtcgctcgccttgctcacctctcggccaaacaaccgtcgggacagcagcagccctcgccagtatttgcttcagcagcagcagcagcagcggcgccagctcgaactgcctcatcgtcctcagccaagtcgcgtcggccaccagctccgccctcgccgccagcgccctcggcgagcgccgtcctccggcccgtgcgctcgcagccatccctccggccccctccccgccggcaggcgcctctcccgcctgtcgcccaaaggcagtcgcgtctcggccgtccttctgcccgacaacgatcatcctccctactatcctgctgctatctctactgctcctcttgcttcctagccctcctgcccgtagctcctaccctcaccctcaaccacccacgaacacaagaggaacgcgccatgccgaccggaagcatcgaccgagccgccctcctgggcgagaccgtcaagaccctcaccgcctggtgcaaggtacgtcgccatcctcttcttctccttgctctcatcctgtccgacgtcctcgtctctccctcctccgtactcgcccgtctgccctcgtttattgcttcctcttctctttccgccgtcttccctcccttcccgtgttccgtctcggctcgcgactgaagcgtcactccttgttgttctgcccgctttgcctcttccatccactccctactgcagtccaaggacatcaagaccaccggattgcgcaaggacaagatcatcaacgccatcctcacctcgtacatctccccttctgtcgtcgcgttgcagcttctctgctcccgcctcccgccacccgagactgatatggcctccctgcctccacttgcagctcgcacgtcgcaacatgccctctcaaggcggccacgaggcccagagccaacctgcgccggtccagctgcaacaagtccggagagaccgtcagcaagcgtccgtcctcttctctcgacgtgtcccttctcggcctgcgtgccgcgagcaacctgactgacctcgactctgatcctccctccttcacctcgtcttacaggctcggcccgtgctgccgccgttgctgcctcgcactcgccggcaccgaccctctcgccgccgccggccaccgtgacctcagcctcggcctccgcgtcctcctcgtcgtcggcctccgtcgccggcctgtacgcctcgccggccccggtcgacgtcgcggtcgaagacctcagcactacccttgtcgcccttgaggctcggttcatcgcccacgaggccaagcatacggccgagctcgccgccacccatgccgaaattgctagcctcaagtcaatcgtcgtgatgcttcagcgccagatgagcggctcccatgacgacgaagagccggcggtcgacgctgtcggcaccgcatctgcggccggcagcgtcgacgacgacgaggctccggtcgaggccatcgacgagttggccgcagacaatgacgacgacaacgaggacgcccccaccacctcggactctgccctcgaaaccctcgccgctctcgccgtcgccaccggcgtctctccgatggcctcgtcctcggcctcgacctcgcacaagcgtgcttgtaccctgtcgtcctcgtctgacgcaaccgccacggaccagcccacccacaagcgggcccgctttgactctgactcgaccgtcgactataagcccgccccgagcgacctcagctccgccgttcgtgtcgcctttgacctcaatgccgacgctgcctcggcgagcgtcgctagcagcggcagcgtcgccggtcaggtctcgcggccgacggccctctgctcgacggccgctctcgtccctgcctcgtcctcgccggcttccatggtccctcccacgtcctcgttggccgacgtccactcgttatcgccgactccgcgccgtcagtcggacatcctcgtcttccctcgcccttcggccgtccagactccggtagcccagactccggtggcccgggctatgttcgccatgaccggcgacgccagcgaccggccttactctcccccttcgtgctagtcacttctctcctcttgtcacccgatggaggaggcccccccttcttcccggccttcgcgaccttcgactctgccccttcttacccccttctctttcatacctcttcccttcgttaccccttccctttgctacccctttcctttgatgccccccggatccgcatggcctgctttgcacattgccttccggtgagcgagtcagcgctctccagcccttctacccttcgatctccttgcgctgcctctcatcggccgtcctacttccttcgagaccgccgcctccgcgacctgcgcaagtccaggatcatgcgatgccctgccagacgagagcgatcgcccagtcggccgttgaaatcgttgcgatccgctcgaccgcgacaagtgtgacggcagggcccgagagaggctcgagtgcctgctgaactgcatgcggtcaaagagtgcaatggtcagcgagggccagaacggcacttcgagggctactcgactagacatacgctcgctgagcgggacgttcggccgatggaataccttgagcgagtaggccgtgcgaagcgaagggatggccgtgagcagtgtcgacgccgagagcgcatctgcaagcaagaggtcggaaagagtgcagtgtcagcaaagcgtcagaccaaaagcgagcaggttgacactcaccgagctctctcacacctgcgacgccccactgctctcgatcaaaggcgctcgtcctccactcgacccgaccgccggcagcggagcctgcttcaaagcgggcaggcgtcatcgcactcgctagcgtcgccaacctcgagtcgccttcgtcctcatccgacgacttgtcgtcttgatcagggccaccgctcgctctcacttcgcccgtgtgtaaggccacctgccactcgaccaaagcatcccgtggcaagccgactggtgtgacaaagaggactggcgctgagcctgaggcggatgacggttgctcgttcttgtagaggggatggccggtgcacgacttagcggcccagcacctttccatgtcgagggtcaactctgcgaacgtaccttttcaagccaagccaaccagcctgcgcgtgcgccagcgagtccgccagccttccagccggccgggtcgagccagcagatgcagccctcgacgaagctcgcgctgagcgcattgcctccggtgccctccttgagtgcagcccagattgaccgaacgtgcttgagcgagagggcgacctcggtgttgaacgaccgaggggccggcagcgtcagcgcggacgggaccagcgggatctggccggccatcgacagtcgtcggtcgacctggaaaggaagaagggggagcaggccatcaggcgtggcgtccatcatgggcggtgaggaaaactcacgatgacggcctgcgagtaaggcccaatgttggccggcgcccagtagcttaaactctggacgtgcaggccgcgccggccgccagcctctacgccgttgtttggcggctgctcgccctcgcgtccgacaaaggcgatggcctcaacgcgagcgcgctcaccctcgggcaagagcgtggcaacgcaggcccgcgtcggaggcgaggtcccaaagtactgccggtagacggcgttgacgagcgggaagagggccattgacgagagaaagagcgagatagcttgaatcgagctgagcgggtggggatgaagcgcggctggcgaaaggaaagtatcgtcagtcaagtacggcgagagactagcacgtgacgtcgaggtatcgcacccttcaagttccgaaagaggctgtgaacctcgtcctcgattgaaaggggatgtccggtcgagcccaggccgttgacgccgccgacgcaaagccagccatcccgctcggccctttgagcaggcccgctcggctcgagacggccggatgtacccctgccggtgagatcaaggtcgtcaagcgaagatgccaaccggccagcggcctcctcatcctccataatgcgctcgaccgtcgaccggatctcgactgagtcgtcgtcgaggtatgtcgcggcgccgttgtcgtcctgctcgagtgcttcgtcgagcagcgcccttgcactctcggcagtcagcggaacatagtcgtccttggccacgagcgacgtcctgaggatccggagatgggcgaccggtgcgactggcgaggcgtcgacagtcgtgatctcgctctcgtctctgcgtcaatcacaagagaaagaggtcacaagagaaagaggtcaagatccgcgtcagcaaagccgaagccgcctctcatggaagcgccgccgcagcgcataacgcacaggctgatgcgctcgtggaacaagggcgagtcgagcgtgaccgtttcgtactcgccgccctcgccgcaaatgtgcaggccgtacgcggcgttgagcctccgaagcttgggctcgagcgtgttgagtgtccggccgagatcgcgctcatcgaggccgaccccggcgaccttgacgagaatgcagctcatgcccgagccgatgatcttggagagcagcgccgactgcgaggcctgccacatgaaggccagcgccgtcaagccgagtcggccgcagctgaacggtgagcgaggacggtgagcgtttggattcattacagcgtcgaccatcgcttccatccgtttagccggcgtgcgttcctcaggactgtggccctgagcctctcgttcgagacagcccgtcgccgccacgcagcccctctctgcctgcctgcgtgcgcccagattgcgacggaaagagactcacacctgctcgactcggacgcgctgataggacgagaggatggcgccgaccgagacggcttcgacatctgggtgtgtagcctgcgagttgggccgggtacgagcgaccgggcagcggccgaagcgcagtagcatcagctccctgtggcccctgcacacctcctggcactaacaacgagcggacgcaccttgacctccttcaggagctcgtacagatcctccgtctcgtcgccgacagtcccgcctcctgcatctgagacgccatcgaccgcatcgtcccggtcgagcacgccccgccgcgagccgtattcgccggcgacggtgacgggcgtgccttggatgactcgcgtgtagagcggcaggcggagggccttggcgatctgcgggaggagcgagagaccgaccgtctggaacatgaacgagtcgagctcgtctgtcatttcagcgttggcgagtactcgacgagggtcagcaccgggcaggagagagggttcaggaggaggaggaggaccgaccgacgccggccgtcgggaggaggccgccgacggcgatgggttcatggccgttggcgagagattcgagcaagttgaagcacgagtccttgccaccagagaggagggcgacgaccttcatggactgaggagttagtggtcgagtaggcgagtcgacgtcgacgtcggagggagccgtcgacctcgcaccaggtccgcgcaggcgacccagcaggagccagcaagccttcgagctcgctgagccccatctgtcgaccctcgccaggaagagcccatggggccacaggagagtcatggccatttctctgccatccgtgtctgatgtacagcgcgtcggggcggctgtgagacggggcgtgttggccgacgactctgagcgtcgcgtctctcctcccggcgcgccctcgacctcgcgacgacgactcttccgacaaccagcataccctccgcggctctctcgctcgcacccatccatctctagcagcgcagcctctcatgtcgcgccagctgtcgcattcggccacgccacagccgcagcctcatccagcgcagctgcttcagcagcagcaacaacaggcgcacaagcgcaaggctgaggcggccggcggcccatctgccggcgacccgttcaagagctcaatgttagcccttgctctcttccaacgcatcgcactgagcgaatgccgcttcgcaaattgcagcagctggagctgacgccgttgcttctgatctggctggcggtcccagacgtcggccgccgctgccaccgttgccgtcgctgctctcgctgcccgagtcaaagctctacgccgagctgcttgagagcgagcagaagctcgactggatgctcactcgcaagcgggctgaaatccaggacgccgtctcgaccggccgagcaggcgccggccgggccaaacggacgctccggatgttcatgagcaacacgacgacccggacgatggcggccgacgtgccggccgacacgtcgaccggtgaacggccggagccgggcttcgtgatgcggctcgaaggccgattgctggacgtgcgtttctgcctgctctcctccttggcggatgcgcccttctgtcagcgccgctgtaaccagctggctcggaacttgacgcggcaccctgcggctcctgacgacgcgactgctgagttgactctcctctccctttgacctcgtcgtactcaccggctgcagagcggcaacccgcggcacgacaagtttcccaagcgcaagttcacgtcgttcgtccggtcaatcattgtcgagcttccgcccaacatcttcccgatgccgaccaacacgatcgaggtgcgtactgctcgaggtaccctggcgttgagaggatataagcgctgatcatccgcctcttccgccttgcaccgcctcacagtggattcggccgccgcctcaggcgcacgtccctcaggatgggctgaccgtcatgcggccgctgcctccgacgaccctctctggagagcccctgcccgtgtcgttcgaggtcaaggtccacctccacctcgacgcctcgcccgagcgctacaaggtcgtccagccgttggcgggcatcatcggcctcactcacggcacgcggaccgaaattgtccaggccgtttgggcatacatcaaacttcacggcttgcaggaccgcgatgaccggaggcggatccgcaacgagggcccgctcggccaggtacgtcccgctccctcgtcttgcgtgcgggaatgctggcgccatgtcgactcgggcgcttcagcactgtggcttgccgactgacctgctgtcctcccttcctccacagttcttcccggcccagcccttcctcgcgctcaaccacatccccgagctcgtccagcgcttcctgacggtcgccgacccggtgacgctggcgtacccgctccggctcgacgtcgaccggcacgtccacccgcgggtgtttgacgtcgaggtcgagattgaggacccggcgatgaaggggccgaagggcaactctgtcctcggcgcatttatggaggagggagggcgcgagattctccagctcgacgacgaggtgcgtcctgtctttgattgttgcgcaagaggatctaacgacagtcgctgacagtctgcttgccgacgctcgctgcgctcttctcgtccgctcgtcttctcgtgccgtcccctctgcgaccgccattatcctgcggcgtccttcgtccgccagatcgccaatctgtcgatcgcgatccgcaacgctcggaccaagcgcgacttcctccaggcattcgccaacgagccccgcgagtttatccagcgctgggtcgccggccagtcgcgcgacctccagctcgcgctcggcctcgaatcggccgaggggatcgctgggacggggctcggcaaggaggatctccggaggagcgatacgttcctactgccctgggtgcgtctctcttctgcgtctgggctcacttcgtgccgccgctgccgtctttgctctttgtggtcgctgattcagattcatttctcgcctgcaggccgaggaggcagtcgtcatgatggaggcccagcggctggccatcgtccagcagcaggtggcgatggccgaggccgccgctgccgccgctgcaggtggtggtggcaaccaggccggcggcggtcgtccgcagcagggccgatgagggcctggtggcgccaactcgattgccgcttgtaacacttcttttctctataccgctctttgatgagctcggaagaggcgggctctggccgtccttctcgcggctcttgtatcgatccctgcccgactgctcctgcccctgccgtgcctgcctcgcgagcgagcgaaaggggagagccctgccggtcctccaacacatcaagtctgggctctctaagcacttgccgataggcgctacctctgccatgatatccctactcattcgtgctcgccatcgtcgcctctcgccgctctggccgccctagctgctctgagtgtgaaaccgaccctcaacaacgaaagaacgaggcgatcggccaccttgaagcagcacccgcaccaagaaaaataaaacccgcgcgggcgggcggaggagcctcctccgccagcgttccggagctcggcttctcccttctctctaggccttcgttaccacccaaacgaaccccgtacgtcccagagcagcacaggtgcccaagctcttgaaaggatcgacggtaaggaagggaccacagaggctgacgactttccttcttgctgcagcacctcccctttcccccctaccccccttctcaacactcacttcaaaatgtctgctgaggacgtctacgacggtgccatgtaagtagaccctccacacacaagacttcaagggacccgcggccagcacgaccgagctcgggatcagccaccgcagctgcctttgcccgttctggtaccaggttggccgcagggctggcggtagctcgggattggggcagggtggcgcgggtcgagctcgagctcccgctctgctccggcctgcttgggcttgatcggagcaaagagctcggcttcgagcccaaggaggagaaggacgggtagcacaggcagcccaggaggagggagagcagcccggctgacctgtcgtgtgcgccctttccctctcagcggtatcgacctgggcaccacgtactcgtgcgtcggtgtctggcagaacgaccgtgtcgagatcatcgccaacgaccagggaaaccggacgactccctcctacgttgccttctctgagggagagcgcctcatcggtgacgccgctaagaaccagtcggccatgaaccccaccaacaccgtcttcgatgccaaggtcggttcccatccgcctcttgctcgcaagcgcgccttagccggacgctgacgctctcacttcttatcactcgcagcgcctcatcggccgccgcttcgacgaccccgacgtcaagaaggacatgatccactggcccttcaccgtcattgaccgtgacggctcgccgttcatccaggtcaactacctcggtgaggacaagcagttctcgccccaggagatctcgtcgatggtcctcatcaagatgaaggagattgccgaggccaagctcggcaagtcggtcaagaaggctgtcgtcaccgtcccggcctacttcaacgactcgcagcgtcttgccaccaaggacgccggtctcatcgctggcctcgacgtcctccggatcatcaacgagccgacggccgccgccatcgcttacggtctcgaccagaagaccaaggaggagaagaacgtccttatcttcgaccttggaggaggaactttcgatgtctcgctcctctcgatcaccggcggtgtctttgccgtcaaggccacggccggcgacacccacctcggtggcgaggactttgacaacaccctcctcgagcacttcaaggccgagttcaagcgcaagcacaagcacgacatttcggacgacgcccgcgcgatccgccgtctgcggtcggcctgtgagcgcgcgaagcgtacgctctcgtccgtcacccagacgaccgtcgaggtcgactcgctctactcgggcaccgacttctcggccaacatcacccgcgcccggttcgaggagatcaacgccgccgccttcaagtcgacgattgacccggtcgacaaggtcctcaaggacgccaagatggcccgcgagaaggttgacgacattgtcctcgtcggcggctcgacccggatccccaaggtccaggcgctcgtctccgagttctttggcggccgccagcttaacaagtcgatcaacccggacgaggctgtcgccttcggcgccgccgtccaggccgccgtcctcactggccagacgtctgacaagacggccgacctcctcctgctcgacgttgcgccgctctcgctcggtgtcgccatgcagggcgacatctttggtgtcgttgtcccgcgcaacacgcccatcccgaccaacaagtcgcgcaccttcacgaccgtcgaggacaaccagacgcaggtcacgttccccgtctacgagggcgagcgcacccagtgcaaggacaaccggctgctcggcgagtttgagctttcgggcatccccccgatgccccgcggccaggccgagctcgtctgcacgttcgagatcgacgccaacggccttctcaaggtctcggccctcgaccgggcctccggccgcaaggcccagatctcgatcaacaactctgtcggccgcctctcgtcggccgagattgaccagatgatcaaggacgccgagaactttaaggctgccgacaaggacttccaggcccggcacgaggccaagtcggacctcgaggcctacatccaccagattgagtcgaccatctcgggccccgagctcgccctcaagatgaagcgcggagccaaggcctcggtcgagcaggcgctcgcccaggccctcgagaagctcgagattgaggacacctcgtcggacgagctccgcaaggcccagctcatgatcaagcgtgccgttgccaagtgcgttctccggctctttcttttctttttggccagtgcgctgacctcgcctgctctctctccctctcctctctcagggctatggctggctcgcgcgcatagacgcagatctacaaaatcagtcgctttttgcacggatgatgtatttttgcgctttctccgtaatccgagtcgacgaagggagcagctgtcgtctcgttcttgaccatcgtgtccctctgcaagccttctcttgcatcacgaaaaagagggggcgccgatccttcctcagagcgccctccctccctttgcactccgtgacattcatgcgtccctcactctacctctaccggtcgttcctgccagcgagatggtggagagaagtctgccggccggcagggcagaacagtcgcagacgcgtccgactgcgccgcccgacgagacgcgtcgagcgcttcgaacggactcgacctcaatcgcaacaaccgcttgtcaacccccctcgctggcaagatggaccgccggagccgcagagcacgcctcgaccgacaggtccagaaggaccaggtcaacctgctctggctcctgcgctcgcagcgagggctcaacccgctggccgcagctgcactcggccggcgcgttccggccgcagcgaccagcttcgtcccttacgacgacttcgacaaccttcaacaacctcccgcgccgccacgacccgacgccatcggtggtgactggtcggaccggtcagtctcggctccgcccaagcagactttcagcctcgttctccaaaacaagcccgagcccgagatggccgagacgggcggtcctgttcgccggctgacggctctcgccgccgacgttgtcgcgcgacatctcgatgcctacgatcagacgctctggaacgacgggcccgagggcatgtcgatcgagctcgcccgacacgtcgtctgtgcactccagaaaggtcgcggcgtacttgaccgcgctgcttgggtcctattcgtcggaggctacggcccaggcgtgcttccgacgcgtgcgtcctcgaccgacgagagatgctgctgcgacaagctgctgctgacctcgcggcttcttgctcttatgacttcagctgagataaagcgtgaccctagtctcggagccgtcgacaacctggcgctcggcgtcccgttcgcagagctcctgcacacgctccgctcgtcgccgccgacgtgcgacctcctccggctgaacggcctcgcccactttgccggcgaccatgtcctcacccagctcgatctctctgacacggcctttggtgacttcgactgcaaggccatcaaggacttgcgcttcctgcgcgtcctcagcagcgagcggtgcgtttcttcgctgctgcgctgagctggacgaccagccgaactgacgactatctcgcccgtcatctaatcgaacaggaccccgctgaccgacgccggcgtccgcttcttgacgtcggccctttatacggaggcagcatcgactagcgccgacagccgggcatcgatcggacgaggcttgctccgtctgggggcgtggtcgatgcgaggctgcgttggcgtcaccgacagggcggctgtcaacttgcgctcctgggctggcctctgctacatcggtttgtccttctcttcctaaccagcgtctgcagactacacagtctctgatactgctctcacaatcactgcagacatccgccagagcagcgcgacaccctctgcctttgttcagatattgaaccggcctggcgagggatcctctccgtcaaagtcgaggagcgccgtcaaatttgcactaaccaacccacctgaagctggggcgacgctcctcgacacgctcctcgcgtcaccgagtcgctttccatttctcgcagcacgctcatcggcggcgatatgctccattacgaccgacatggccaagtgccggaacaaaccttcgaccgcaacctacgacaagcgtcctaaactgaggacaactctcacggacacaagtggcgcggatgtcgagcagccagtcggcttagtcccgagatcgaccgggctcgttccgacgccgctcggcagtaccatgacgatggacgtcgtcctcgtccgccgatccgcttctactgtgcaggctcggccgcccgtcacaggaggcatcaagcgcaaagccagcgccgaggtcgcgcgcgtcaaaaggcgccgggctgacggaccctcgtccgacccggccgcggaactctggggcgcgatcctcggccaccggtcggcgtgctctccggaaccggcctcgaagggcctcacgccgtcacgcggtttgggggctcagcctgatcggccagcaaatgtacgacagccggcacttacaacgccgacgccgcctgttcgcccatcgtcaagccgcttaccgccgcctgtcgctctcaccgcgcggcccttccagccgacatccgctcgcaagacgtcgtccgcggcggcccctagtttgcgcacctcgcagtcagcggccatgcagaagccgaccatcgacggctttgcctcgagacggccgctggcacaagccgctcggatcggcggcggcgggcgcgcgctcgcagggaagggcagcatcttccgcgctgcaaagtggttgtgaccggggtcgggcgatgctatgtcgtccagcgcttgtcaggacagtctgcaacggaccattttcagtgtcggtgggctgccggttgatgggcggttgggtagacgagaaagggattctgcgccgccgtcgccgctcctctcaaccatcacaccgaccctctcctcgcgacgccggccgcctcctcctcaaactcttgtacttccagccaccaggcatcacagcacctcgccctcgctctagcggaccatgtctgagcctctgcaggcgaccccggcagcgggcccctcgacggcgccgccgaccgccgcagcactggccacgggcgcagcgccggcggcggccgctcctccctctcggcaggaaatcgaacgtcggctgagcatcagcctgccctcggccccgaaacctgtcctgccgcctctcgagccgccgagggcgtcggcgagggtcatcagggtgcgtctgccttcagttggcgaccggtgctactctctctctggcaacagcggagccgtggccgtcgacccgagctgcccagctgactctttgagccgttgccttctcacgaatcggccgtcgatgttcccaggaggtcatgtccgagtcggacgaagccgacgacggcgaggatgacgaagatgaggaagaggacggctttggggacgacgaggatgacgagatgcgccgcaagctcgacgaggagcgggtcatccgctcaggctacctcgacaagaagggcgagaagcgcaaggtcagcgagcctggctgctcaccagacctggggtgggagctgatcgctttccttgctcgcagacgtggaagaggcgctggttcgtcctccgcaccggcaagctttcgttctacaaggactcaaaggttagttgctcctctcgtcaacggcggccgataatggatcgagctttcgcgctgatcaccgcttgctccctctcgctccctcttgccaggagtataagctgctccggatcatcgacctcagcgacgtccattcagcagcgccggtccagcacgcaaagtacgcctcggctttcgggatcgtgacgacgcgccggacgttctacctcaaggctgccgacaaggccgaggccgacggctgggtcgcagacatcaacaccgccaggggatcaccgtagccaccctctcgctggcgttctttaatctcgcatccttcactcgtcgtcctttctcgctcgctccgtcacgatcttcacgactgcctccctttgccactcgcttgtcgactactccatcagctcgtccctcgctcagcgcctcgtgcgcatctcgcagagcaatgtctgatttttacgccgatctgaaacctacttgtccagaactgcttccagacagtcggtcagcggtttcgctgctgtcagaggacgctcggcccgcgcagctcgtcccgcgtcgcgcgcgcgaaccgggggtccttcccttcgatagcatccttcacgtcggcctgcttctcaattcagctccgagcatggccgccgtcggctcccatctgcgctcagcagctcgtctctggtcgcgggtcatccggtcgagtcgcctagcggccagctcgacgacggctgcaggccggctgcttccagcagcgcgcttcgtctcgaccaagccgtcaccgtcggtcgcttcggccgcacctcgcgcagctgctaagccaacgtctgccaatgctgtgaaggacctgaaagaggcctcgccgccgagcaagtggctggtcatcgaaggccttccggaaggcacgacgagcgacggtacgttgaggcggagggcgacgccctcggacgcaagagccttcccactgatccagccgactccctcccatcgctttgctatagctctccaattgctctgcgaggtccacggcgctgaggaggctcgggtcggaagggacttagggggtctcttgacggcccgctttggctgggttgccttcgcttcgacctggcacgcgaccggcgctctcgtctcgctcacccagtcgggtatcgatggcagcccggtcaaggtcagcttcgttgcagagaccttccttgaagatcttgtggcggggaggcgtcctcaggccgctggaaaggcgctcgatttggacgcaagccctgccccgactaccccggccgacgtgaagaagcctcctactttaccttcacctccggtatcgcgctggtcgctgctaccggttgcgggtgcaactcaagaggaggcggctccagagacgtttctccccaacagagattatccgccgacggccggcctgcgcatcaagaacttgcccttcaagtccgacctagagctgagagaggtcatcgagctctacatccccgaccgacccttctccttccgccgccgccaggtttacctccaaggccagcgccagccgccatccaccgacgaggcgccgatcgccgaccttacgtttggctcggttgaggacgcaacggccgcaaagacgacgctcgaggccgtcgccttcgacggctaccacctggctatccaataccaggctgcggacaaggttgagccgctcgaggtactccttcgtcgggcggccctcagcaaggcccggaacggtcgcgtctcttgtccgcctgccgacgcccggtcggaggccgaccaagttcaggtcaaagtcgacgcgaatggaaacaaggttgtcgtcgcaacacgaggcgtccgcctgatccctccccctggggtcgcgttggccgagctggccgatgaggtcgtcgccttgctccgccacggcatggatggacgccgctatcatcttgagtgccgggagatgtcgtccagctcctgtgtcgaccttacgttcgccaaccctgcccaggcggccgcggtcgcagcggcgtgcaagggcgtcagggtcggcggccagccgatcgacgtttccttccgccggtccaagtacgtcggcacgctcgatgaggacggcggtctcatccgtgcggctagggagcgaaggaacatcatcgcgtcggcaaaaccaccaaagtcgaactcatcggatccctgatttcgcgtgcgttcttctcgtctgcaagcattcgcgcgagcccattgatgctgacgccctgacgcttgttaacctcagccctgatcgagcagcttgagccctgctcgtctgacgcccttttgctttcacgagattcatgacaccttgacgcccatttttctttgtgaggggcgcaccttgatctgtgagaagacgatcttcctagcatgggattacaagggaggtgcaggagcaggactggtgttacgaggaggtcgcgcgcagaaaaaaaggtcgtgaaggagatgagctgatcagagcttcttgccgagcgagagcttgatcttgcccgacggcttgggtgcatcggtcgcagcggcggaggcggcaggccgcgcggcagcgggcgcggacgggccagcagcgggcgtgtcggcaaaactggtgcagcaaggagaggagcgacgtcaggagaccgcgcttcaggagcaggagacgggcgagaacgcacaagccctgcgggaggtggtcgacagcgccagagccggccatgccgccgagacccatgggcccgctgttctctggcgcggcgttctggcgcaggttgaactcggcccagcgtgggcacttgcggttggtctctgccaggagtgagggtcaggcgagcaagcagtggtcagcgagctttttatgcgtctctgagaagcgaaacaagacgtactcatgtggccgacggcgccacagttggcgcacttgcgcgatgtcactggtttatcagagtcggcgagcgccttcttacgattcagccgccgcgtctggttcttcttaagcttctcgatctcctcctggaggctgcgagtcggggccggtaagagaggggaagggtcagcgactcgcgaagctgcgtcagcgagacgtctgccagcattgcggacgcacaacttctgcatgcgcttgtccttgtcggcatcgcccgtcggcgcgaccgcctcggccgccatgcccttctcctcgatgatctgccgttttcggatgtaggcattgatgatgttggtgtcgcgaacgatctcggtcttccacttgccgtggatctgcaggaagtacggaggggaagtcagccgtcagtcaccgacgtggaactgagaagccgcaggggacccggctggcactgaccagccgcttgatcttgaggacgcgcgcgccctcgcccttctgcacctgccggctactgccgacgctcatgccgtcgtcacgatcgatcgagcttgcgcggctcatcccgccgggcgagcgtggccggggcgtgttgccgctcgagaaggcagagtagcccggcgaggaaggtacaacgtcccagccgtcgtcgttgccgccgcggccactggggccgatcgacatggacgccctgttacgagcggcctgctctgggaactcctcctcctcggtgagctcaggtggcgtcgacgacgagagggcggccacctgggcgtcccagatccggcgagcctcaagccggaagatctgctcctggacggtatggccctgcttctgctgcgacttaggtagagtggcgatgtaggctgtaaaagggagatgacgaaggaagacgtcatgtcagccgattcgtaaaggagcggcgccagcttcttagcagttacgcacccttgcggtcctcggccgtctcgccctcgcggagaaagatgtccttcatcgagaccttgataaaggagaagccctcgccgcggccggtcgggtcgccttcgccgtagagctggacccatgccttgtcgcgctgcgagtgcaggtacgtcttggtcatgatccacggcgcgagcttctgctcgctgtccatcttggtctcgtcctcgttcttctcgtccttctcggacgtgccgtagcccgagtcctggagatgctgccgaccgacggccatcgactcgaccatcatgaccgactcggggtcgaccatcttaaggtactcagccgggtccgggaacttgaggccgaccttgagccgccacgtctgttggtgaatgcccttgcggtggaactcgaggaagtcctgaaggttgggaaaagaggtggctgtcagcgagcggagcgctggctgcctgcagcaggctgctggtgccacaccttgagccgctggcgcatctggagctcgtggcagtcgggaaagtacttcatgagccggctgagcttcatgtggttgcccttggctttctgcagcagccggtaggcgatctggtgcgtccggtccttggcggtcgctgagaccttgcgcgcgtgcggaccggggatctggaccgaggggatcgtctgaccgacaacaaagaggttcttgatttcgcggataaagtagcgcgacgagccgttgacagtgacgctgcgagggcaaaggcaaggcagagaagtcagcgccccgctcttcttcggaaaggcagacaaacgatgggctgctagaggctcaccggacgcagagaaaatcggtctcggccggcttgtgcttgaagagcggcgccttgatcatgttgttgtagagcgactgctgcgtcgcgcccttgtcgatcggagcaaatgtcgagtaagggggctcgtccttggggtcgagcacgaacggctcgccgagttcgagctgtcaaaaaaggatgggaccaaagctggtcagccgtcggacactgtcatttaagcttccgcccgccgaacgagaagcgcaccttcgggatgtggtcgtcgtcatccgtcttcttgcggtagtagttgacgaggacgctccccattccaaagccgctcatgaccggcgggttctcctcctggaggcgtggaagtccaacagcaggagtcagccgacgcgaaatgcctggaggcatcacagagagggactaaccgagaattcccagaggacaaagtcgctcttgtcgcggagggtgaggtcgccgaccttgcgaaggccttcctggacgtcgccgcccttgccgagcttgcggccgaccttgtccttgagcttgcgcgccggcggggagacgtcgaacgtgagccggatattggactggaactggagcgggggccgatgccatgcccggagctcctgcttggtgagtgatgtcttgtactactcggttgaaccgtgagacgggtgagcaaaggcggccgagaccaaggaggaagcctgagcgcagaaagaagacaagggacgcacgaagggcagctgaagcttgagtgccgggtaagcatgctggacgacgatcgaaccaaacgtctgccggacgcggtgcttcatgccctcgtagtgatgatcgtttgaaatgttgtaagggtcgacgtcgtggacggggacgatgggcggaggcgccggcgcgccagtcgggtcggcatgcgcgaccggcttgggcacctttttcggaggcccggccggctgcagcggcactggaaggcgggcgcataacgtcagccagtgattccacctttgaaggggtcgaggaggacacactgctctcgagtccttcgccctcctcctcgacaacggcctcgagcgacggcccagccccggccgtcggccctccgaggtcggttgcgtcccagacaatgccccgaacccagtcgcccgactcgacgagcgggttgtacggcgcgaggacgtttggccggcgtcgcttggctggcggttgcctgtcgaaggggagaaagagttgcaggcatcagatgaggcggccagcgcggcgcatcaggcgcctgaggtagggaggggacgtacccgctgatgaggccgtcctcccactgctcgagctcgacgcctcggaaacggctctcgtcggttgactcgcgcgcaacgagccgcccgagctcagcgagtgacattgtcgccatcggtggccgcgacggcccgtccccctgcatgatggcgccgagagaggcgtcagcacaagccgacaaaatgacagagaggaatacagatacgaacgggtgtctgaggcggagggctctcttcctcatcgtcgtcctcgtcctcccactcgtcgccctcgtcctcgtccgacgacagcatcagcacgtcgccccagcggccctccctgcccttaccgcggacgctcgccggaagcagcgcgtgcatgtgcgcgcgagccgcagctggaccggcgagactcgagcggtcatcgctggccggaaggtcgacagccgcaggcggaaggatggctgaggtggcggagtcgtcagcaggaatgcctcgtgtcagcaatgcagccaaacctaagccagacgcaaaggccaagagccctgaagcatgcagcgcaccatccgtgatccggaccaggttcttgcgcttcgcatgctgctgcgagggtgcttgggagggtccggccgcgccgccgaagagaccgacaaagtcgagcacgccgtcgggcgtgaagcccggaaagacagtctcgattgagcgctctgctggtggaggtggtggcggcggaggaggaacgggcagcgaagggagcgagtggagggtcgggaggaagagcgcgttgctgtctgtcggctcggccttgaccctcggcagcagcgcgctgctgctcgcgccaccgctgctcatcgtccgggagagagcggcaaggccagcctggtagtacttgtcttgctgcgagggctgtgaggtcggcgcgcgtctggcaaaggaacggtcgtcagcaaggacgggtggagattggaaggccgaggtgccacggaccggctctcctctggctcgtcctccgcaagaccgtcgtcgccatcctcgtcgctctcatagacatccttgaagatatcaccccggtcgagtgtctgcttggccttggactgtcggcccgagaggccgacgtcttcgaggccgtcggcgccgatgccgaccgaggagaggacgtcttgaagggcgaggtcgcccaggaaggagagcgcgtcggcgtcctgcgcgtcgcgagcgggtatgtcgaagatgcgaggggccagtggcgaaggcaggagcagcagtagagcgtgtggcagcggtcaaagcgcagcgaaggatggatgggcaggcacggcgggagttgccacagagacgaagcgaaaggagaggggtcgggtcggtgggtcggcgtcagcatccaccgccggaaggctcgctgagagctggctggctagctcctgcgggctgcccagtgcatgggatggcgacgcacctcggccatcttgccagctgctatcgcggcgtcgacgtggccctgcttggatgaagggtcgagatgtcggtcggtcgtcggtcgtggacaaggtcgagtggtcgagtcaagggaggcaactacgccgcggtggcgaggttcccacgagtcggctggaccggagcagcagctcgaccttgtggctcgtccgcttgctccctggacgacaggcgctcgccatctcactcgcagcattgctctagcagacatgacgacatctacgtctactcctctggccgagtcgtcctcaccgccggcgcagacgccgccgctgacggccaaccttctccggtcgttcaagccctcgcggacgctcgccttggaccctctcgccaagtcgaccgtcctgctcggctcgctcctcggccagccggccatcctcacgctcgcgagggcagcgcttcccgcagaaatagatgggctaggcgggctcatcgagtcgcttgcgggctggcaggctaggggcgagaacggtatctaccactggggcggggcgacacccggcggtcctttggctgacggcgggctcgagattaacctcgtctggccggcgaccgagcttcatatccgcaaagtgcgaggccctgaccgctcatccgtctacagttggagcttactaacgacgatccgctcgctatacaaagcacgagacgcaggaataccgactcgtgaccgaaacgcctaagctctacgccgccgtcaccgagccctacctcctctctctgcctccatcccggacgacatggtgcgctcgcttccttgctctgcccttttcaagtgaacttggtcgtctcacttggcccctcacgaaccttcacctctgccttctggccttccccctcccttgccgtcactgcgcacccctcatgccttcctgctcagggtccaaaacatcctcgacggcctcaaggagcaggaggcgatcctcctccgcacgccgacctttgtgctcctgcccgactccaagtgggaccagacgacgctcaccaacctctacctgacggcgatcgcggtcgacggcgcaaagctccgctcactgcgcgacctgcggggcgagcatctcggtctgctgagggacatccgagcaaaggccggggactttgtagcagtgcggtgggggctggagaagagtcagatcaggtgcttcatacactaccagccgagctactgtgcgtctggattttcggctacagcctgcatctcccgtcgtggaacgagcgctgatccttctcgttcgcccgtggttgcacacactgttctgtcgcatcagatcacctgcacattcacgtgacgcacgttgcttatgtctcgccgtcgggtgggaccgcgtgcgaacgcgctcatctgctcgatcaagtcatcgctctcgttcgtccgctcatcccgaagcgggatctcgctgatgctggctgaccaatcgcccctcgcccatctccagctcgagatcgacccagagatctacgccaagttgccgttgacgtacgcgctcggcgaccggcacgccttgtacccgctcatgcaagccgccggcgccctctaaagccttgttataccaaacgcgcgcggccaaactacaggcgaggcaacttacactccagctctgaccggccagatatcgacgatctagatcgctttcgaggtcgactgaggggaccgtcggcttacgatcggaggcgacctagacgcagcttcttgtctacacctggtcccgtacgacgcaggcgcagtgtctctcgtttcgcgatagacggcacgcctcgatggcccctctcgcagacagcctctttgctgcttgttgatagatagacatgggcaataacggcagctcgcgaggttgacaggatacggaatgaggaaatcgaggaagaagggccggggaaatctagtctttgtcgttgatgccgctgtgcggatactggattttgggctccgcatacgatgcgacgagatccttctgcgtgtagtttttggcgttcggcgagggcgccggcgggacgttgaccgggtggaagtgggcccggcggaggtaggagaggacctgggggtagcgcgtgcgtcagcgagacgaccaggatgacatggcctgaaagacgactgaccatctctccctgaacgtcaaagtgagcgtgcatgagcgttcagcaggaagtcgctgcaattggggtcaagatcaaaggacgtacccagagccaggtggcggcgccggcgacaaagtgaagcccgtcgcgcatctcgctgctcaacgggctgacgatccggccccagtcaaagagctcaaagccggtctcgaacgcgagcgaccggacgagctgggcctgccgagcgacgccaggtatggttatgtcagctaggcgatgactccagaactcggcttgacagagctctcacctgctggaacttgcggatcggcgagaagacgtgctcgggcgacttgctgcccagatggggcgtctgcacgacgatctgcagccgaacgacacacgtgagtcaaaaggcagaggcactttcgaaggccatcccgcaccttgcttgtggggaacgtctcgcgtaggagccgcagcaccttgacctggcgaccgcgcgcccactcgagctcgatctcgtcgagcggccggccctcgtaccgctggtcgccgttgccgcgagcgaggtaggcgagaaaaacgaggtcccaagagagacttgagaaagagggagggcaatagttagcctcgaggcaaggtcgtctgaacccgctctttgcgcgacgcacctctcgaagatgatgagatctggcacgcggccgtcgagccctgccgggttgtcgagcgtcggcagaaatatatgctcgagctttgactcgaaatcttggggccggttctcgccgacaaagaagaagggctaagggccgacgtcggttgaggtcagcaggtcgttcatcggcggccgtgcatgagagactcacgatctcctcctcgagctgtcgcccgccagggcccaaggtcagcaagagaggtgagatggctaggaatattgctggcacgcaccatgccctggtggaaccagttggccatcttgaggccgagctcggggatgtcgagaacgcccatccgctgcgagtcttgccaaggcgtgccatctgggctgaacagcggcaggaccgtgcgctcaatctgggtggccagggctcagtcagcatctggtctaggacgcgttgccccttgctgacccgctccgcaccttgtcgtttgagatgtgcatccgaaagtagttgacgttgttgcgcatgagtgagtcgccgacgccgaggatcgtcttattgacggcccactcccagccggcaggcgcgacgcccgactcgctcgcgtcggcgagctgctccattaggctctcgccagcctggccgtagtctggatgaatgccgtcgggcgggtcgggctcccagcggacggtgttaaacaatccccacgggagcgcgtcggccgcgtcgcccatctttgacgcgagctcgaccgggagaatcggccggccgcggatcaggcccggcctcgtccagggattcgtgactgtatcctcgagcgtgtctgggacgaggggcagcgacgggttcgacaccgccggcggcacgggggcgtagttcggagccgacgagagcaagggtggcctgcgcccatcgcacggccaccgtaagtgtcagctcgagccctcgcagcaagcgatcacaggagcagtgcgcatgcctgattcgacgtacaggatccaggtcccgagcacgccgcaggtgaggcctacgagcagcggcgccaggctgcctggctggagccagctctcgcgtccgtcgccgctgctgcgtccgaggacacgcccgaggccgccgagctgaacgcgactgcctgcccgactcctcgccgtcggcgcgtcggcgttcgcgctcgattcgagctcgccgtaggaatctcgccggctggcggcgggctggcgcgagccgaatggcaggagaggaatgaccggctcgggcgagctgcgacccggacgaccggcgggcatggcgcgagtcgactgccggcgtgcggcgggttggctcggctggtcgaggtagggcagtggaacggagccgtgcgactgagtcgtcttctgcaggagcttgcgatatgtaggagagcctgctactcgagatgatagtcggagggtcgacgggtcggagaacgtcagccgagatcgtctggcgtcggttgatgggagggctcgacaactctcgcacgccttcatctcgcagacagctcgcaagaaggtcacaaatggaagtcaagggtcatgatcatcgaacacgagtcttacagaaggggtattaagtgtacgtctcgcccgcgcgtcgtacgcccgttccaagaacctcccctcacccgtcacggtccgacagacaagccctcacagccacacatccccggagggcagggctccgagctccgggagccgccggcggataagagtcgagcgatggttggaggggacagcagggggctaggagacgcggtgtcggtctgggggacgggaacgcgccctgctctgttgtgcgagcagaccgaacttttgtgtcctggtgaagactgatagggtcagctcgcagacaagagcaggaaggacgaagggcaggggtcacgcaccacctctttggtattgttaagggttcaaattcccctagagcgagccgaccgctcttgagggtgccgtcgaaaacggccaggctgggcggtgcgcgggcggtcacgtgcgcagtagcgacggccgcccggcccctcgccctggacggcgacagcgacagctctcgaccagcatctcttgttcaatctctcaggcccgctaggtgcgtcctcggcagctagacagacgcacgagcagctcggagctgacggagctcgatcgctagctcagacctccgcgcaaccctcttcttcctcctccttctgctgccagctccgtcgcacgcgatgctcgaccacgtctcgatctcgcacgagagtgcgttctgtcgtcgttgtaggatgcgcccgacgacctcatatctgacagcctttaccctttgcttgccttaggcggcatcgttctctggcagaagtcatacacgccaacggccgcccagctcgcggcatcgccgagctcgccgctgaacgcgctcgttcgcgacgtcttcattgagggcaagccggccgtcgcgagcgtcaacactggcccagccggcgcccaggcgactgccgccggccgcgaggtctgggagagcggagggtggaagatggagtgggggcgggagaatggcctcggcctcatctttgtcgtgcgtccgagcacggcgcccgacgcctctcgcggtcggctcggctcggctctcggctgactgaaccggatcccccttgcccaggtcgcctatcaccgcctcctgcagctgccctacatccctctgctcctctcgtccctcaaggacctcttcctctcgctctacacgccggctatccggacgctcgttgacgcgctccggtcaacctcggccgaggcgagctcggctgccctccaggagctcagccgcgcgctcgacggctgggacaaggtctgggagaagctgctcaagcgcgtcgagagtgaatcgggcgacgcgcccggcggcgtcaaaatgcggcgcgtcagcggccttcgcgagactgcgcagccagagacgcccgagctcaggacgcggagcggcggacgacgcacgcctggtggcttgagtggccggggtagtccggcacctccagagtctccgtacgttccagctggacgctacattcgccctttacgcgcgtggtagctgacgtgccagaccttgctccctcctgcagggcgacgagcaccccagcagccagcgggacgacaaccccgcgcaaggccgtcggcacgccatcaaagccgagcggctcggcctcaaaggtcctacgcaaatggaacgactcggtcgtcactgaggccgacatggccgccctcgacttctcaactcctccgccggcagcgtcagccgacggcggcggtggcggcagcgacatcaacgtcgacgacctcgtctcggccgcggcgatgggcaaacgcggcaaggacggcatctacgaggtggccgactaccacaccaagtcgaccgcagctgctgaggacgacggcgagatggacgacctcatctcgcgcgcgctgtcaaagacggcgctctcggccaagaaggcagcctcgggcggcggcgcgagtactccggcgacggctgccggcccggcgaccggcgcctttagctcgctcttctcgcgcttgactggcggcaagacgctcgagcaggccgatctccggccggtgatggacgcgatggagaagcacctcatggcgaagaatgtcgctcgcgaggtttgcgagaaggtctgcgagggcgtcgagagtcgactgctgggtaagaagcttggagctttgtcgagtcagtcgtcccggtgctggcctgtgctctgttgctagctgacgacctcttcttcctctgccacgtttcaggcgtcaagggcgaggtccgggccgcgctcgaagactcgatcacgcggatcctgacgccagcgacgtcgaccgacctcctgctgtcgatcaagaagcacttgtcactttcggcctcgctcgcctcgtcctcggccgccatctcgcccgacccgtacaagcttgtctttatcggcgtcaacggcgtcggcaagtcgacgacgctctccaaggtctgcttctggctgctccagaacaacctcaaggtgctcatcgccgcgtgcgacagcttccggagcggtgcggtcgagcagctgcggacccacgtccgcaatctcggcaagctgagcgagggcggctctggcaagggaaaggtcgagctctttgagcgcggatatggtcgggacgtcgccggaatcgccaaggaggcgatcgcccacggttcgtcctggcaccccacacgcacggtactgtccgtgactgaccgaccaagtggttctctttcgcagccaaggataattctttcgacgttgtccttatcgacacggccggccggatgcaggacaactcgccgctgatgaagtcgctctcgaagctcgtctcaaccaacaacccggacaagattgtctttgtcggcgaggcgctcgtcggcaacgaagcggtcgaccagctgaccaagtttgatcggagcctgcgcgagggcacgcgcgagacgagtggcagccggggcggtaagggtggcgagcgtggcatcgagggcatcgttctgaccaagtttgacacgattgttcgtggcccccgggcgtctgctcgatctcgcaagcttgcgctgacaattagcgccacccgttaacaggatgacaaggtcggcgccgcgctgtcgatgacctacgtcaccggccagcccatcctctttgttggctgcggccaggtgcgtcgtcaactcggactggcccgaggctcagcggtcgtctgaccttgtgcttccctctcgcagacgtataccgatctgcgacagctcaaggtcggccacatcgttcaggccttgctgcaggattgacgatagattgtattgctgtggctgctcgattgctggcgggaaggtctcgtggcggggggagacctgctgcgcgtgcggagggtgatagacggaggtaggtcaaattaagggtgctctcgatcatggccatcagacctgaccttgtgaggctcagcaatgggtgcgtcccttccgctgccgactctttgagggaaagacttgattgaggtagctgtgtcttttcaccgagaacccaacctatcgttggaagcaaaagagatagtctcacccagagtcgaactggggtcgtaagtgagccaacagattgttagacttaagtgataaccgttacaccatgagactttggatgacgttgaacaatgataataaaatataaacaaatttcttttctcccttctagctgacccccgcctctactttcgtccttcgtcctctttccacctctctgcaatgtcctattcacactcagcgctacttcactctctctgctctatcatactccagcactctctgtcgagggatcgccagggcatgcgttcgctccccttagtctcagcccccttagcctaggcagtagctcacccccaccatagtcggccttgcctcctgtctcgtcctacgggtgagacggtcgctgggccggcagggcctctcccctcgggcgacgcttctggcggcgaccggcgacaccgctaatggtcacctccttccgtcctctcacttactaccggctcggcctgacgtcttcggcgtacatgtggcacagcgtacaggcggcgctgctgccttgttgaagaatgtgttgaaacgcaaggtccttaggggaggcaaggacagtcgggcgaacgcctgacatgaacggatgctctttggcatagaggtagatgttgagcgaaggacgaaacggaatgagctacctcagtcaccaaaaagtggactctacatgagatattctaggcacctgttgaccgaaggacgaaccggattgagctacctagagtgagggtcaggacgtgttacaagcggtgagcaaaaaaaggcgaaaggtgggactgatctcagtcaccaataagtggacttaggtctctacggaaggagaaaaagggaaaagctaaaagggagagggaaaagaggaggaatgccgatgcagtccgtgcgtcaggagtgcatcggcaggcgcgcggccggccgcctgctgccgccgctggctctgcgcgccgcgccgcactcgtcgcaattctcaacagtggaaagggcgcagaagacagaaaaaggttgtaaactaggcgtgaggatgaagtaaggtgtaaacctatgactttttgccataccaagccttcggaggctttgcctggccaaaaggtgacggagggcttacagattaggaagcataacgtatgaggagagggcgctggcgaccgcacgccaagccgacacgacgcaccctctttaacacttcgactcgtcgtggcgagaccttgcacggcccgcggcccgcaacgcttcgggtcggccgaacggacccgtccacactatggtacgtcccttctccggcctggatgggctctgctgggtcgacctgggcgttctcggcgccgtcaagggcgggcttgcgggggcgaagggcgtaccttgcgggtgaccaaccgtgcgaccgccggggctggtcgagcgctcctcctgtgtgcgacgagcgcagcgcgaggcgtggagggagcggcggcggtaggcggctgcgcgcgcttgcggctgaaacgcatcggaaatcagctcctcgacgtcatcattttgagagctgcgagcgccgtcgtttgtctccttgcctgctcggtcgcgcgcgcttcagctctgggcaagccgccgctggtcccaagcccagacggcatacctcgagccgatcctgccgagcgcgatggccagaacggccaggacagcgaattcgaagatgaagatgacgcggcctatgaggccgtgggtgtggaggtggccggccgagagcgtgagaagtagtaggttgagcgggaggaagaagagcgtgaggagcgaaaagagccggaggttgaacgttcattgcgagggcgaggcgagctgatcgagctgcggagcaagatgagagagctgccaggaccgacgacgcctcgacggcctcggggggaggacgaaagcgcagtggtgaaggagggcgacacgcacatgtcgatctggtcggctgcgattcgatggaagcactggttccgccagcgaacacatcccagcccgaccctctgccgcagcgccgccgaggtccgagcttctgcgagaggtaggggcacagtgaacagagccgtcgggcgtggtagagaggagagtcaagacccgcgttagaggtcaactcgtgtcgaatgatagggtgcccacaggcgggcggagcaggccgtcagccgatcagcagagcgacagggcttgagctcatccctgctgatcatgagaaaagcatgctgttagagcgtcagccagtctggtcagctgaaccgaccgagagagggcgtccgggcaagaaggtgagttcaggcgaggcaacctcaaatgacgacggacggagcaagacgtatcgctcgcgaaccggcccgcaccaagcgaagggaactcacatttgaggtcggcggctcagactccgagaagcggcaagaaggcgaaagtggagagccctagaaggagaggagaggggacggagacgacggtcagcaggccatgagatggctgacaaggggacgaacgggctggggctaacgcgctgaggttgggcaaagagatgaagaggagacttgttgagagagaagtgaaacgccgtcgtgtagagggagcgaagtagcacgggaaaaaggacgcgggcgagcggaggagaggtagccgaggtgatggttgaggtcggaggctgggcgagctgccagtcaggccgaccgcagtgcagagtgaccgcccgtctttgtcgtcagaagcttgtgcatcggagatcaaagcagtaccgttgaacaaatgttcccttccccgtgcttgaattggttgacagcaaggctgagcgatggttaggctggcccgcggcaaaaggaatgatcaatagcgggatcgaaccgctgaccttggcgttattagcaccacgctctaaccagctgagctaatcgatcttgatgtaagcggtccaaaatattagtactaccatcagaattccacctcaaacatgtgatttggcatgggtgacccatggcgccaatgcctcgtcaacaatccactcgtcgttcgagcacgggccgccagattgctgcaacggtcactaagtagacgccctcgtccgtcttgctctggcgagcgagtcgggcctcatcaccctgatcttactcgcaactccacatcataatctttcccataacatttcggcaacaccggtccgtctgtctacttttcgttcgtttttttttcagccgcgcttatttggcttgctcagttcccttggcccacctggcaaatctagacaatgctcccttgattctctgcctcgtgcggccgctgatcctcgtcgcgaacaaggcacctggccaatcgggatgtgattgttgttgagcgagagacggtacgaagtgagctacgtagagtagcggtcaggacgtgttcaagcggtgatcagaggagcagaaaggtgggactgacctcagtcacttaaaagtggactgaggtctccacataagggaggggagcaaaaaaccatgggggaaacagaaaagaggagaaatgccgatgcgttcgggccgacagcgcgcgcgcagccgcctgctgctgccgctacctttgcgcctagcgccgcgctcgtcgcaactccaacactccctctcgacgagctccatcgtctgcctcctctgccccctctggtctggctgggagggggcgagaacgtgcccccgaagactcatgccgaacgagaagggctgatgcttcagccgacctaagagcttcgtccccaagtcggcgtgcatctggttcgtcggcatccagacgtcgaccaaggtgccatcctcgatcttgtcgcgcgtgaagtgatgacggatgtcaatgtgcttcgagcgagcgcgcgagtttggattcacggcgagcgcccgggcgccgcgtttgtcctcgtagaccgtcgtcgggccggaagggaggagccgcaacgacgccagcaccgaccgcagccaggcagccaggtcgtcttctttgtgtcatgcgccagcgcgacttactccgcctcggaagttgagagcacggcgctctcctgaagccgcctgcttgaggccatagaggcccttatgcaggcggcagacccagccctctttgcccggctgctcgaagccagggggcggacgcatgtacacctcctcctgcagctcgttgaacaagtaggccgtctcgacgtccctcttgtggacctctcagtcgcgggaggccgcctctgcgagcagcggccgaagcgttgtgagtttgaccacaggcaagaacgtctggtccgcaaagtagtccttgccctcgacctgactgaaggcctgcgcgatactccttgtgcgtccttcttcttggccaggacggcttggcagccgacgatgttgacgccctgcggcctcgggactaacgtcagaccttgtgcttgtacagcgacgccatctccagctcgcaccgcgctcctcgcgacttcaacagacttctggctgttccattgtcttcgacgggctgctcctatctgctcgcacctagctccaccggcagtgaaccatgggcaacgaccggatctcgtaatctttcggcaaggacaaggccccagcaggcctcagcgaggcagtccaattcggctacggcccgagtgcctggcgcaaggcaacgtgggaggcggtcacacagcgtcgttacgaggaggcggccttcctacgcgacattgctaaggtcaacatccgcaacgggctgccgtccgactacaaggagagagcgcaggccagtcgttctgacatgaagcaccagcttgacccggcttgaagcaacacccattgctggagttccacagggagcacttgtcttcagcccgcgcgaggtagcggacgagcacggctatctggtcgacaacttccagagactttggcgagctcctggccgtacttagcgttaaggggataagggtctcgtgcgtccaccaaattctctcctgccagggtctccatcaccttgactgtaggacgagacaaaaggcagggtcgactacaatgggggtgagctacagcttggctaaggagctaagtctagggggagcgaacttacctcagtttcaatgaacgactgagttgtaggagagggagcgagcggggtgtatagctaagaaaagtgagcgacaaaagaaaggacgaaagagtccggcggactttgaggcgcggcgtccgggtggccgctgggcggtcgcgctgcccggccggtgccggcgcagtaacaccttcaacagttctgcgtatgtcaggcctacccgtgtactttgacagcgtaagcgcgtcgtacgtgcataagcgagtccttgccgtggcacccgacttgcctgccgcgggtgccgcgccaccgcctttggccatctcagcgcacttcatcgcaatcgacctccagtgtgatggttctaggcccagcgaatatacaagtcacgcacatcataaacgagcgatcagcttacatagagcggctgcgaagtggtcaatcaaggagggcctttgaaggagttgaggaaaccctcactcgtctgccggcgcagccgcgagcgacacagacagctgctcgacgccgcgcctgctggctcacagacgggtcaataagggaagccaaaaagaatccctaaccgggagtcgaacccgggcccttcgcgtgagaggcgaatatcatagccgttagacaattaaggaattgatattgaccaacctgcacatactcattatgataacgttgcaatgcatcagtccaaggtcagataggtctaccgtacgtactcgctcgtttgcattggccgctctcaagtaatcatttatgttgatttctgtctccggttcaatcgaggagccgccgccgattcgtgcttgctgacactcctggttgcagaggcctggtccctgtccgccgccggcgaggtagctgcagtcgagctcatttcgctgcttgagcccgttctgggcgaggccggagtaacaaccaccttgattacgccgagagatcgccagatagtcgttccgtagacgaccgacgtctcttgggcgaaaagtgctctcggagtcgatcgccgcccggtaaatgacaaaaacgtcgtcgtcggtcggattgaggagggctcccagtgctgcgaggacaaaaagcaactgggagaacgattgaacctcgtcgacgaggatctcgttttgaatctcgatgtccttgatgtaggctggcccggcagcccggttcgagcaaggttggacgaaatactgccgggcgacggctcgctccaggcctgcagctggttctagtccggaatatcgcccagatgctgctggagcaaggccataaggcgcttggcctcagcgtcaaacgtgttgccgctctcgtgcgggtccggtaggatgtgaagaagactatgtcgttaggggtagggcagcgtatcgtcgcgggaaaggaaagggctgacctggggcttctcacggatttggcgtgcggtttgcagtcagccggtgcgtacttacttgcttgcgaggggtcgagctgcggacattcgcctgacctgtgctgctctggcccttaagtccgactttcatgcgagcggccttgttcgccgctttacgcctgcaggactccgtcgaggcgagcccgggcgtcgctctcgccggccggcaacgccacggtggaaagccgccggcttgctcggcgccttttcagcacgttcatctttacgtaagctccgctgtcgatgcgtactggatgaccgatggtccaggtctgtgacggtgtcgggttgctgggcagagctgacgctggcatcttttcttcgtcttcgtctgtttgactctccctcgcagaggacggccggcgacgatcggcttcttgcggccgtcgcctggcctgtcgtacaggtaccggcgccactcaggacggaggggcttggctggttcatggccacgcggccaaaagctgtgcgtatagtacatcaccgtcgagccagtacataccagtattttactcggaatatgtaacagtatcataccagcaggcatactagtatggtacaggtagacatactggcatggtactggaaggggtactgataccgtatcagtaggccatactggtatcttaccaacgataccacgttcgactgacattgggttcgtccttcactcaggagatgctgtcaaagtttgggcggaccatactgatatgataccagtatgcctaccagtagggtactggtatgcatactggtcccaccagtaccgatgccggtatcataccggaaacccgtatgcctactggtatggtactggtatggcatagcagtacatgtgtcacgtgacctcaaaatgatgtaccgggtcagcggctgaaaagttggcgttgttggagttgcgacgagtgcggcgtggcgcgcagagccagcggcggcagcaggcggctgcgcgcgcgcttgcgaccgtgcgcctgccgatgcactcttgacgcgcggactgcatcggcattcctcctcttttctctctccctcttagcttttcccttccccccctccctttccgtagaaacctcagtccactttttggtgactgaggtcagttcccacctttcgcctttttgctcaccgcttgtaacacgttctgacccccactctaggtagctcattccgttccgtccttcgctcaacaggcgttgcagtagatgcggacccccccccctttttttatgatgacgcggagcaggtctttggcggtctcgacgcattgtagatgaagacgaacaagaggtctagcaggctcttgaccatcatctcccccgaacatatcaacagtgtggaatcaaggctcacgtgttgcatgcctgtatatcaacgcaaggtaccattgcgaacggcggaacacgctctcggccggcgccttcgcggtggagtttaagccggctgagtgaacgccgtcagccgggacgtccggtgtgatattctcgttctcgacttcctcctcatcccccgcaagcgtgctccgtgcccacatcgatgatctcgctctggcaggtagtgcgatgggcggtgtcagaaccgacggctgccaatctcgcagcagcgtgatatcaaagattcacgcgtccctctcgcgcccgttgcgttggcttgagcttctgagggtgggctctgaacttcgggctctcgatggcttgctgttgttggctttttttcctctcctgttggaatgacatgggcacgagttgggacaggtgacggctgacagagcatgtcttggaaggggaacctacgtcgcgcgctcgacgtccaatcggcctttgccaactactcgccaatcgccatgttgcatgctctcacttgctgcaacgcctaagcccgccacgtcccttgctctgcagtaggcctgttcctctcaccacagccctcattgctggatggaagttcacggtggcgcccctctcgcgtacagtgatcgatatgagccgcgttttgtcgaccttcttgacacaaggccgctttaccgtcgaatggatctcgacgcagcgaccagattactctgtcagcgtacgctctcgtccttaccgccagatcacagccaggtccaaccaacaaggcgtcccagtcatcgcatggggatccacgttcgttttctgtcggctcggcgaggcagtgaaagatatccccgaagccttcgccctcggcctctcccggcaatgggtcgacatttgcctgaacgcccgccgagccggtgaaacctagaccaagcagcaacggctgaggtacttcagtttcggcaacgacgagaagatccgagctcttctgcgagcgaaatcctctccattccgcctcgaatggagtatctggcgtgggtcaaaagaatcacaaaacaaactgccccatgcgggcttgaaccgtagacctctcgattgcgcggtaacagtcgaacgctctaccaactgagctatagggcaatcgttggcagtcctgactaagattgaataattccaagcctaaacactgcttcgccgcctgcacttttgcggggccgttgtcgccaggtggtaatcatcatctggtcggctacggctgcaaacgtgaatctcaaggtcattcgaagcgcacataataggtagatgggtctggaacgcactggccagcgcagaggggtcagagacacgtatgtcactttagtccgaggtcaacatggggagtctggagtgcagtgacaaccggtgttgtgaggagccgtacgaggtcatcagagcatgctggaggctgcgttatcagaggacgaatgcgagagggccgagaagacggtgatctgccaggtgagaggctgcgtttgtctccgatgcctcctcagctgaatctcgaaggacggaccattgaggcgaggcggctcgtactgaacgcacacgatcaaatgtacggtcgactctcctagaacctaatcagttagctcacagactaagtacatttggtccggcggagcgttggcttatgcacggcagcctcgaaagcatgggccgctttagcaactttgagaagtcagcttttacttatgtgaggagacccctgcgttgccgttacctagccatacatctcacagtgtgcgtacaatagcctttgacgctccacgcgacggagtatcgtcgagctccggggagaggacgtgcagcgccgtcgagtcaaacgggctaaagaagagggaagaggaggaggtgggacaggttcgagggcaagaaacttgtcaaagtcagactgatccggaatgaaaaaaggagagaaggaggagagaaggaggagagaaggaggaggggaggaggaggggaggaggaggaggagtaagaagaggaggggaaggagaaggcggcggtcggcggcggcggcggtcgttggcggaaccccaaaagccaggtcactgacggtcagcttgttcttccaagcgacctccgttaggaccggctcgttgaaagtggcagcattggagtagagggctgccatcatccttcctgtaagtcatgaaatttcatcagtcagtacgagagcaatggaggcggagagaagggggaagacgtacccagacctgcgcggggactgccttcggcgcccagacgagaacgaggaggttgtccctcgtcgggacttggcctgcctcccggagccggcacagattctgtcttatgtgtgtcttgatcgtgctcgttcacccttcaaaggtagcaagaaagcattttatctcagttgaaggaacgggagtaaggtaattgcgagacacgtacgactgtgaacccggtagccgacccccgcgctcgcattgaggcacttcctgcaaaagcagaacccgtttggcatcgattgaaaccgaagacgtcgagttgagctcaagggagaaatggtgttcgaactggatgggacggtcaaaaaaatttagagggcgccgaccgacgcggtcccgttccccgtcggcgggttgccaacgacgagtccagcacggccgtcgcgagccggaccttccacaactcctgtggtcctgtttcagatacaccgctgcgccgaccaaggccgcctacattatgcaaaccgaaagcccgctctaaaagcaaggcatcggtaccggcaaggccaagggcaaatagacatcgctgccgctttggtgagaccgcagcggccgagccgaagatgatcgccttgcagcgcctgcctatttgtgctcgtgtcgatgcaaatcgaacgcgcccgctgccttgcgatttgtgttgaacgacacggccttgcaggggacaagacagtcggtgaacgcttaagatacatgaggacttgcgccttgaaaattgctatgagggaggaagccgtaagggcaagagagtgatgttacggagggaggtaaagcgtgttacgttcgatgaagcgtaaccctaccccggctctcccctctcctcctcccccgcttgcttcgcgcccgcaggagcgccagcggcaggtccgtctcctccccggcgacttcctcgagatcaacccggcggccgtttccttcctcggccggccgccgcaggcgcacgtcgcgctcgccgacagctcgtccaaggggctcgagtacgaccggcgggcgggcctctcgcggctcctcgtcgagctcgtcgggctcacgccggatcaggcccagcgggcgattgcggacgatgggctcgagtgggatgagggctcgggcaagtttgaggtcgctgccaaggagaacgttggggagagggggttcgacaaggcccggctctgctacgagcgatggctcgccgtcggtggaaagttctacggaagggacatggcgccgccgctgagccaggaggtgatccgttcgatcctcggcgaggagccgacggtcgacggcctcagggacgacgaggaggccggcttcacgctccgcgagcgccgggcaaagcgcgagcgcgcgctcctgtcgcctgaggagcaggccaagctcccgccctcgacggccggagacgaggccggcgcgctctacctgacggacgcggacgagccagccctcgtcgccagaagtggcgcctccaagctcccgacaaagtcaaacgccggcgtccggctcacgcccgcccacttcccggcgcttccctcggacccgtccgggacgatcgacttccatctcccgcccttctgcgcgccccagctattcgtcccggcctacctccagccaaactaccgcttctgcacactcacctacctccggcaccctacggcccggcacaacatgtgcgagctcccctcgcccttcgacgcaaagggcgccatcatgcgtcgggcgtgggagtggtataaggctcgcaagatgcgcgtcaagagctatgcgggcggcttgtaccccggtgggacggacgcccgcgcgaggagggcgtatgcccgccgtgggcccgagctcggacggacgggcgtccacgaggacttctactaggccgattgatcatggcacccccttgcccctcctaagtctctcgatcagcccgcgagtctttcgatcaggcagcagaatgaagaggaggttatgaggaacgtcagcaatagcagccgagctgctctcgttcaatcagccgacaaagcgttcctcgcaagggacaagaggcgagacatgcagcactgaacgacatcccaacggcaggcgagaacgattgaactagagggttcaaaggagcgagaacgtatccagctgcggaagaacggacgctccaacttctcgcgagtgtcgtccgaaaaaggcaaaaaggtggttgcccgacctgagaatcgaactcagagctgaggatggcttctttttatgagacctacgttttaccattaaactagtcaggcatcttggagttcttgagcaagcaagtgtggtttgtatctcacgtacaaaagcgaagccttccgggctcgcttcctgctgcttgtcgagggcttctaagtatccctgctcgtgcaagagcagcccagagacgtccgctatcgccagcatcttgcctgggtcgcctgctaactgcgagctcgctttggcctcgagggcgacgtcgagcacgagtctctccacccccctctctcgccgactcacactctccgccgcccaccctcgaccatgggctggccaaaagacacctgatccgcccgcactgccccgtctcggttgagactgcagacgtccatcgaatcactggacctcgatgctcagcacggacgagaaccacgcttcggcctcgaccgtctcctgccgagggcacgtggcctcgtcctcccgccggttgtcgtgcccatcgccgctggcatcgtccagcagcctcctcctcgccctcccgcccctccccggccgccgagatcgagagctcctcgacaggtcctcgacgcacgcccgaaactcggccgtgccacgcgcgaggacgccgaccctgaagcgcagttcggcggtctggccggggttgagcgtcctctcgcttccttgaccggtcgcgcctccggaagcggtgccgtctgcggctgttgagcttgaggttggacgggaggaggaggagcggacgagctggctcggcagacctgaagcgacaaaatactgcgcggcatgggctgccagcgctgctgcgctctcggccgccacggctggccctccgtcgacctgagacagaggcagcgaggcccaagaagagggaccagcaaaggagagaggggcgaggtagacgagcggttggatcggacgggctggagagtggcggcagaaaagaaaggacggagtcagcgacctcgcggaggtgttgcgagggcagaaagagcgccgcaccgagccgattcgtgagcttgacgacgacgtcgaagaacgtgtccctccgcgcttcgccctccttcaacgtttcctccacatcgccgccgccaccgccgccgctgtggataagggggtcgacagaaagcttgatgacgacctcgtcggcccggagaacttcgagctgaggctcggtgagtgattggccgcggagcgggaggacgcccgagcgtgcgctgccgggctatcacaaataagcgtgacgtttggtgacggtcagcctaggcccttcgtggtgggtggaagaggcaagggagatgcacctctcgccagacagcctcgataagctccatcagcctctcacggtaccagaacagtgtccgcatccgccgctcgtcgccggccgaggcatttgccgagcgcgatgagaggacgaattgccggtcgcccagggccgggatcggctggactgtgtgagcctggtcgaggaggaagcggcggatgggaaggacaatcctggcgagcgcggaccggaggtgggtcagtgggcgaaagagggaagcagtcgaggtgaggccaagagagactaacctctctgttgagccgggcgagacgagccgtgtcgacagcagggccgcttcgccctggccgtcaggatcgcccgtgcccgtcgccttgcgccggaacgagacctcgaatggctgcatgtacgtgttgcggacgtcgatggcaacgagacaatgctcgtcatgctcgtcgttgtcgccgccatcgccgccggccgtcgcgttctgctgctgaagggtgtggacgagtgcgctcacgctcgccttcctgtccatcgcgaccgacgtttttgtggcgccggaggctgctggccggacgatcgggatccggaggacgtcgagcgcggtgcactcgagcgtgtgatagaccgagatgaggatcggaaaggcgatctgccgcgtgtgaaagtaggttggccggacatcgactgccgtcgatgtagaggaattcctttcgagcaggccgtagctgacctggacgttgccccagctgcagccaaccttgccgaggcacgtcacgctcagcgtgagccgtcctcgcggagggatgaggaccgagccagcctcgggcggggccgaccagcgcaagacgggcgcccgagcgaggtcggcctcgagctcgtaagcctcgccggcctcgagctcgccatcggtcaagagagcctcaaccggcgccgtcgttgagtcgagaaacgagagcttgacaaagtcgaccggcaggtggccgacgttctcgagggtgatgcggatcttggtcctggcgagagcgaaggcacggcagagggtcagcaagagacaaagatcgcgaaggctagccgcaggacacactcttcgccggcgtagagcatgagtgcgccgtgggtgagcgacgtcccgcggatgcgcatcgtcggctgctcgggcaggacctcgcaagtgatgaacgtcgaatcgacagcctcgccaacaggcccctcagctgtcaaggcgccagctccgacgcgcgactcgcgcttggcccgggcgcccagcacacgctggatcccgccgagcttgaccgtccgctcgctgtcaagcagctggctcgcccgcttcctctgccggcgctcctcggccgcgtcgtggaggggcaagaggaactcggcctcggagccgttgctcagacggacaaagcagcctttgatggtaagcgtcccaggctccgaggcaaaagccgagagcttgatcgactgcgccgcgttcggggcgagcagcaccgacagcggctcgcagacgatttcgggtccgacagtgctgcagcgagagaggcaaaggcaggaggtcagagctcggtcgggcatcctgaccgacgacgcgagctgacgcacctcaggcggacattctggatctcgagagggaaggaaaaggcgttctgcagcgttacaaagacgtcgaaaggctcattctggacgacggtcgactgggcggtcgggcgataaaggcaagaccgtcagcgcaggatatccaggcgtcccatggggtgcccaagataagtactgactgcgccgagacgtgcgaccacgcgggggttgaagaggaagggatcccgagctgcgccagacgacgaggcggcggcagcctcgcgctcctcataggcgtgctggactggcacgctcgtcgccgcgagtctggagagaagagatcaagaaggagttagcgactgagggttggtctaaaggctgcccggcaaagacgtacgagggcagctcgaggctcatgacgaccgagccaggccagaagcgcagacggtcgccttcgacaagctcgccccgacgccgagctgtggccagggcgcgaccgaagacgttcgccaggtgggcttgctctccgggcacgatgaagccgtgcagggtccgcagcatcgtcagcgcatacgagatgaccgagtggtggtctgtagcgtaagggagcgggcgtcgcttcgcgtcagtcactggccgccagttcgggggccagaaaggacgacggacctggcagcaactcggcgaggccgatgctgtcccgcagagcccgtagctgcagctctggccaaccgacggggaggccaccctcgccagtcgacgacgggtcgctgcttcggtcaatccgctggtcgccggcccgaatctccttgacctcgcgttcgtcacgactggcaaagacaccgccagtggcgtcgacgtcgacgccgtaggcgactaggtagcggtccatgagctcaagcagggcctcattaccctccttgccgtcttcgaagcggacgctgacagcgccatccgagctggccgggcgagccgccgcagcgacggcgatccgaccgaggacgatcatctcgccgaggcaggcgacgaccatgcgcgcaaagacgccctccttgcggcgcatgccgagcgcccggaagacgccgacgagcacgcgtagcgccgacagccgatcggtcggcggcaggaggacgagccaggggccatgcgcgagcgtcgcccgctcggcgacggcatgcctgctgacaccggacggagccgatggccctgtttgcggcaaatcggccggcccaggagcgcaccggaggtaaggaagcaggtgaggtgagggcgccccccgctggcggatgacgagcagcaatcgcgcatggcggagtgctgcgttcatgaagagcgccgggaaggggctctcgcccgagggggcgtaggtcggcgtcgcccggtgatacatggtgagcgccgtctcgaggtgagccgagatgacctcgtgcgccgggctcggggagccagtcgagccgtcctttgcaggcagcgagggtgacttgggtttgcactcgatcagcacgccggccgtcgccaggccctcgagcgtgacaccatgccagagcggatcgccggcgccgcccgccatcgccgccgccgaagcagccgccgtcgctgggagcctcgagaactggagaagcgcgtcgaggaacgactgctgggcgtcgccgagccggcctgcgagcaggtagaggctgcccaggaccgacgccagccgagcagcggcgagagggagggcagttgcggccgccgtcacaggggacccggtttgcggcaaggacgagggcagattcccgttcgttgactggctgatctgggctgaggggactcgtttccggccgggcgcgccaaacgacgtcttgatcggtccgacaggtgcctcgagcggggttgcgacgccgttgcgcaggcttgatgccgtcgtcgagcgctgcatcggcggcggcgggccggcagaggccaggctggtcgaaaagttgggcgtcgacgggtggccgttgcccagctgctggtgctgtcgcgccccctgggccgagtcggtccgtgagaggggcgagcttgatcgcgcaatcggtagcgtctcaccccggaggagcgagaagtgcggcgtcggcgtcgtcgaccgggagccgagcggggtcgagccggacgctattgacgacgccagcgagagcggcgggagcgactgctgctggaggagagccatgccgctcgccgactcgagtgagttggcctgcgaggaaggccggaacagacagtcagtcgagaagctggagtgccgcgaaaagtcgagaggccggagtgccgcgaggcatccagcctctggtacgcacgagaccagcaaaggcaccgagcaggcggccgacaagatcgccgacgagcgcctcgaggaacgcgctcggatcgtccatcttcggaatgacagtcacactggtgccgtctccctctgcgctgcggccctcctcgctcgagtcgatgacaagctcgccgtcgccggccgagccctcgccctcgacgccgaagcagcggacgacgagtgggcgctcgccggtcgggtaaagctcgtcgagcgtgttggagagcaggtgtgctgccatcgagagcgacggcgtgcacgacggatgcaggtcgacgagcgcgacgacggccaggggctggctcgctggccggagcaggccgagccctgctgcccgaccagcgtcgaggcctgtcgaccaggcgagatggatggcattattgttgttgttcttgacgagcgccccaccgctgcccccagctccggtcgcagaggttgaggcggcaaacgacgacgaaagcgaggggaagaagcgggcggtcgacagcgacgcgtcgagcggaacgtccgactggccgacgctgccgaccgcgccaaagagggcggtgtagcgctcccatgtcgaccgccgaacgcggccgacagggacgacgaggatcggaatggccgcaagggcgagcggcgacgaaggactgacctcggccggctcttgaggctgctgcatggggagatggtccgccgcgcgtcggcttgaaggggaggagaggagagtctgcaggtgtccgtcctagctcatccggtcgagcagcgtggctggagctaggcgtcgtctgtgtcgtctctacgtcagcctctatcaacctgcgcctgaagggcagctcagaggacaggacgagttcgagggtcagccgggggacaggtcggctgcggctgaaaggggcggcgacgcaccgcctgtcttgccgtctgacgtccacaagttcggcggtcgtctacgcctgtgtccgacctcgcgtgactaggtcgtgtgcttggaaaggcttgcttaaaggccgagagagcgttgctggcgagggcgttgtggtcggagggatatgcaacagcgagttcagctcgaagcaaggccgaggtgcgctcccgccgaaccgtgaccatcgcctgccttcccctcctgcctcgctcacgatccgggtctctgtgctcttgcggttgcgtgtgatgccgcccaagcagcctgctgcttcgaagtgtgagctttcagagggtcccctgggctggagacgttcctgaccaggccgacccctctgtgtcgcgcagccttcaaccactggttgctgaaggccgagcccgaaacccggctcgagaagggcaaggatgtcaagttctcgatcgacgacttcaaggcgtgcgggacgactgagtgggatggggttcgcaaccaccaggctaagggcttcctgaagaacggtatgaagaagggccagaccggtcagtcgcctcgcctccctcaacgccgcctccccttggctgacgggccgacggaaccccagcgctcttctaccactcgagctgcaaggacccgggcgtctatgggacagccacgatcctggtcgagggccatcctgacgagagcgcctttgatcctgaccacccgtactttgaccctgtgcgtcgctggcctcaaccgtcccttctcgccccgctgcgcgctgacacatttcgcttcatcgcttcgctgtccgtgtggttgcagaagagcaagcgggacgcgccgacgtggttctgcccgacgctcgagtacgcctcgacgctggctcatccggtgacgctagcgatgctcaagcacctcgcggcgctcagtccagaggacactcaggcagagcgtgtgagcatgggcctcgactacctgactgaggaggaccatcgcggtacgttttctgctcctgcttagccgcactcatccactgacttttgctggccccttccttagcgctcgccgagatgccactcgtcggcaagggcaggctctcggtccagcctgtgtcagacgttgccttcgcggccatcgtccggatgggcaaggagggcggctgggtcgccaagtccatcaaggggccctgggtcgccatcggatcagggtcggcttcgccaggccctccagaggccgcgacgcagggagaggatgcggacgagacggagccgccaaagagatcaacggcggcggccaaggctggcaagaagcggacctctggtgctgtcgccactggagccggaggaaaggccaacgttccgccagtggccgacgacggcctacgacggtcgaagcgggggaggacttaggccggtcgtgtcgtcccttttctcactctgtacccctaccactccttgtaatcatcgcaggttcatgctgctttgcgctcagtcaggcgagtgccatttagccagccagagttcatgcgaagggtaagtgcctcccttcctgccgaccatacgtacgcccgaacgacgggagccggcggtcgccggggcaatttcaaccctatttctcgagctgttcctttccttcctcctgcatccatccacagctctctcacaccctctcttagcaagcaggccagatgcctttcagcggaggatcatcacgaggcggcagtggccgcggtcgaggcggcgacggctcgagccagtcataccgcgggcggtcaacccggaaccccgtcggccggccgaagcaccatgaggatcggacggcactcttgcctcggtcgctgcttgatcagctcgatggcggggctggagccgagagcagtcagttgtccgagcagctggatggttggtccgtggttcgttcctctgacatcttgccacctcccgctcgtcgacaggtcgaggcagtggcggccagcccgagcggctcagccgcaaggacgagcgcaagcaggcccggacgagctccaagggtccttcagtcgcccggcccaagcctgttccgacggacaccagctcgagctcagcactggccaagtcgtcactcagcttgagctcgggcgacgacgcctccaagaagcgcaagcgggccgaagctgcgcccgcgtccaaggtcgagcaggcgacggcatcgtcggccgcccggagtagcaagctcgccacttcgaccccgctctcgcggctcttgggcgaggaagtaccccgggagaagaagaagcgggcgctgccgacgtctgccgaggttctcgggatggcaggcggctccggcagcggtggcggcctggccggtgacgaggccgaggatggcgagatcgcctggctcgagtacgtgctcggccggggcaagtggagcaagtccaaggccaagaaagctgcaccaaaacaagaggacgacgacgaagaaatgagcgacggactggatggtgcgcgccctgagccgtccacccggccgcccgtgtcgagaggctgatcctagactgcttccccttcagacctcctcggcgacctcgaccggctcgaccgcgacctctttggcggcatgggaggtagtgatgacgacggcgacctcagcgacgaaggcgacgcgcccgacgaggagggcgtgcgcaacctcgaggaggagccctggaacggtatctcgggcggcgacgtcgaggacgacatggagctggagggtgcgccatcggacggggacgaggttgcgtcatccgagcaggagcatcttgaggacgcccggtcgccttcagcctctcctccgcctccacagctggtgccggcgaccgaggcaccggcgaccctcgcagctcccacgccgggcaagtacgtgccgccggcacttcgtgctcggctggccgccgaggctgctgctgctgccggtggctcatccgaggccgagctgcgcaagaaggaggagctgctgaagcttgagaagacggtcaacggtttgctcaaccggctcggcgagagcaacattgacgcgatcctcggcgagctcgaggccgtctaccgcaagtatccgcgaaacggtctgtccccgccgacagctcctgctccaggatttctgctcgtattatgatgctgacgcgcacatgccccttggcagacgtcacgacgacgctcaccaacctcatcctcacgacgacctcggcccactcgaacctgctcggctccttcgtcgtcctctacgccgccctcgttgccggtctctacaaggtcatcggcatcgagttcggttcgtcccctcgcgtccttcataggcgacggctctcgctgacctcctcggctgacctttttatctccacccgtgccaggcgcgagcttcatccagtcgctcacgctccggctcatcaatcagcttgcccacccgccgccagtgccagggccggacgacgtcgacgacggttcgccgggcggtaaagagtttctcaacctgctcgccctcatcgccgagctctacaacttccaggtcacttcgtcggtcctcatctttgacctcgtccgccgcttcctcgaaggcgacggcctgcgtgacgagcggagcgtcgagggcctcttgcggatcgtccgaagtgagtggtctggccgatcatggccagagcgaagccgccgactgacaagaacccactactcccttcacagacgccggcccccagctgcggcaggacgacccgtcgtcgctcaaggagatcatcctccgcgtccaggaaaaggcaacctcgctcgatgccgcctcgacgagctcgcgcaccaagtttatgctcgagacgctcaccaacctcaagaacaaccggatcaaggctgcccagggcggcgaggcaacggccgaggcgacagtccggatgaagaagttcctgtctggtcttgagaagaagcgatcgggtgagtctttgaacctgctcgccggtccctgagaccctccggctgacccctcccatccttgaaatctcctctctcccagtcctcgctcacgagcctctgcgggtaccgcttgccgatctcctctcggccgaaagcaagggcaagtggtggctcgtcggcgccgcctgggccggcaacccgctcgtcgacaaccaggtcgcccggcaggcggccaccgttggcggcggcctgaccaaaaagcagctcgagcccgaggatgatctgatcacactcgcacgcaagcagggcatgaacaccgacatccggcgcaaggttttcatggccgtcatgggcagctcggtgcgtcgcaggcagcggtgtagcagcagcagcagcagcagcagccggtgaccagacggcggctgacctcgctctctttctcttcccgcaggactttgccgacgcctacgctcgtctgatggagctcggcctgactgatgtccagcagcgggaaatggtccgcgtcctgctccactgcagcgccaacgttcgtcgcactcggcctgtcgctcgtgtgcagactctcgctgactcccctcccccgccgcccaccttgcaggagaagctctacaacccctattatactttggtcctcgcgcgattgctccagctgcacgcccaccgcttcaccctccagtactcgctctgggacttcttccgcgagctcggcgagggcgacgttggcgggaccgaggtcgtccgcgccttcaaagagtcgggcggcaaggccagcaagggccggcacgtcgctaagcggcacgtccgcaattgggcaaaggcctacggctggtgcattgctaaagagagcacgacgctcgccattctcaagcccatcaattttacgcggctccggccggcgtcggccggctttatccagcagctactgatcgccctcatcctcgcctcgcagacggcctcgccgctgctgatcctcccgagcatgcgtctcgccgacctcgacccgacaccgctcaaagaggccgtcatgaaggtcaccaacctgccgggtctttgcgagggtctcctctactttctgcagacgagcctcaccgacgacggcgcctggctcgacagcctcggagagggcgagaagcaggtcgccgtctggggccgcgaggtcctgcgggacgagcttttgctcggtctcgaaggtcggatggtgtcgaccatccgggacgacgacgacgacctctagatgtcgtccgactcaatctgttgaggaagagccctcacgcgcgcacctgttcgttgagccgccacctcctcgtcgccgtaagagcgagtgcagatgcaagaggggatcaaattatggggcaaaagggtatgggggaagacgagagagcgcgcgcaggcagagtctagtcgaggatgtcggtcgacatgcagacgaggccgagggcgtcctggaagaggtcgcaggcggtgtcgcaaagctcgtcgcccgagatctcccgcttgtcgtcccacgacttgaggtcgtggctgccgatgcagtcccggaggatggtgacctgaaatccccggtgctgcccgtacacagcctgtgggttatcgcaaaacacgcaggaaggacgtcagcaatcggccgagcgaaccgtagccatagaatcagggatatccacagaagtcgaaatacagaacttcaggaagaaagggtgtcgtacggggatcaagagtcagtcgcagatgcgctgcgttgggcaggatagagtggcggcttacctggggctggtagccgacgaggacaatgttcttgatgcccttcgactggaggtattcctcgagattcgtgtcgtagaacgccgagccgtgagtcttggcaatgaagtgctcgttgccctgaggctcatggccaggaatgcagccgtagggcgtgcccttaatcgactcgacggtcgaagtcttgtcgccggtgtggacgacccagatgacctcgcctccggcctgagacgggcgaggaaggtcgatggagagtcagtcgcagaccttcttgaaaggcggaatgaaagcgcgcgcaccttgcggtaccgctcgacaagggcagagatacgctcgttggtggcctcgatgccagcgaccggccacatccccgagggcaagtagaagttttgagagtcaatcactacgagcgccgagcccttgatggatgctgagccggcgtgtgcgagcataggattgatctgccggaatcgaaaggaagagggagtggccattgttgaggatgaggcggtcgaggtggtagagtggtgagggaggtgggctgagcggtcggtgtcaaagagagagagaggtcgtcgtctggctcaagcctctcttaaaagctcgcccggggcggatacttagaggccaagagctctccgatgctctgggcccctagaagacattgacagtcagcgcgaggcggagagttggcggataaagttgccacaggctcgaggatatccgtggctcgcttggtcatcagtcgtgagcgatgataattaaaagcttggtcaccagtcgttagcgatgatagtcagtatccggccggccgacgactaatcggctgggagaagtacgagatgctggaggaaggacggagacgaggggaagcttgctcgtgacgcagcaggagttaagaggagcgaggcggtcgcggcttcgtagcgagaaggcaccggcagtgcacttgtgtgcgggcagcgacggcaggtctggtcggcgctgttgcagaccgaggcaggcgaagagaggctgctgacaatatgatgggcacaactccctcgcccaagcttggaggctcgcccgactaaggtggcagcgcttcgcctcgcggttggaggagtgtgccatgacaccgccaatcctgttcgacccgctcaatacttcgggccgcatgcatctcagtcggcagccttctggaaggcgacggtgcacacggtcgagccttttttcccgccaaaggagaagctcgggtgctggacgcgagagctggcaggcgagcaggccgcgcggaggtcagtgtcgagcgtctggagggcaccgtgcagagattagctggggcgcactggaaggtgaagcctgcagaaattacgacggggacagtcgaggagagcgagacaagtggtgagtgtctgtgtgctgctcgtcagtctcgcaaggcgctgggcagcccagacgtaccgacaccggcattatcaaagcgcgcccgaacctcctcctcggtaaagttgcaactggtgatgaggaagaagccgccgggtttgacgaggggcgcgagcttaagcgggtagagttcggccggcggcaggtttgacggcggcaagggcgcagacgagagcgagatggcgtcgtacgttcctaagcaggagcaaacggcaagcgagagtcagcgcagtagagaccggaggcaaacgacgacgccacgtaaggcgagacggacccttgtcagttctggtggagtgaaaaggcggcagggtgcagcgggggtgaagcatcagcagggtgccgtcagggagtgacgaagcaggccacacgagacgcacacgaggtcccaaggtccgcctttaagagcgtcctctccgagcatgtcccacgcctcgaacgtgacgttctgctggctgccctcggccggccctggcgccttctcctcgccatcgtcgtcgctctcgctgtcatcgctctcgtcgtcgctgctgccctcggccttctctgcaccgatcagccgagcaagttcgacgctaccttggctgtagtcgaccccctggaggtccgagccggcgtaaccaccccggcgcgacgagaggaggaagaggaaatggccgttgccgcagccgaggtcgagcacgcgcggcctcgacgccggcggcagatgcgaccgcgtccaggacaccatcttcttggcggaggactcgccaaacctacggcacaggtcgaggagcagaaggtgtcagcgtgagcagcgaggttggacagaggggtcgtcgcggcctcggctgcaggacgcaccagacctcgccctcctcaccaacgtccttgaagacagcgacctcacgtctgcgcgagatcaagcggagctggagtcagtctcctgctgcatcagagcagcaagtgagccccgacgcactcgtagacttggtcccagctagcaaggaggcgaggtcggaggcgcctgaggtcagcctcccggtgagcgacgcgacttccccaaaccaaagctcactgctccttggtgccgagcttggactctggcaaggcctcgatctcggtcgacatctctagcaaagcgaaggtcgggaagggacggtaggagagactgggttgggctcgagtgtcgatgttggcaggtcggagccggctggctcagaggcggctgaggtcgtccgtcgcgtcgcagcgcaaggtcgagcgctgtccctcaccgccatcttacgagcttcctcctgccgcttcattgagaacgaagctggacggcgcatccatagtaagtctttgatctgccggcagtcgtttgacagtctctgaaggtggttgctgactagcagcgctctgctctgtgcgggccctcccccttggacaggcgcagcaacccaaccggccctctcgaccacccttcagaatgagctcgacatctccaaccccggccgacggcagcggcagcagcaagcgcaaggcgatcgactcgtgggaggactcgtctcatgtcgtcgagcgatggggtgccggcctggcgaacctgccgcgcggaggatccggctcgccgtcggcagagcccgtcctgcccatcgtggcctgggggacggccggctcagctccgacaaagaagcatctccagcgagtcggttgccgcgtccgagaccgtcggatcgatgcctatggcatctcggggaccgacgccgaacgactctgggctgtcgaaggtccgtccgccgtacctccgctcgtgccccttggttttgacctgtaattgacgacgacgccctgtcgttggcagtccacaagcgcaagatggcgggcgcgacgtccgactggtcgctcgacgaagacgccatcttccacgcgtaccaaggcggactgttcgactttgcgcaccttcaacagctccagtcggaggcgtggtccagcggcccgagcggcgacggcgcgcacgaacgccggtcagacccttcgttgcgaagcggcccgcgcgacagcgacctgtcgacaatggcgaagaccgagatcaagctgtaagatgcctccctggaggacgccgcagctccgaacggctcgccctcgacctcgatcaagaatggcggccactcgcctcccctcttgcccgaccccttgaaccggccgcactctccaccccgagtcgacttgcagacgcctcccgtcagcgactcgacgccggtcagtctgacgcgggttcggtgctccaccacgcgctcgtccgcctccagtcgcccggcgagagcgctcggcactcggcggccgagacggcgatgctcgtagagcgaaacgatgcttcccctctcgcgctcttggtcggagagcgtggctgtgcgaagctcgagataggcgtgccggcagcgctcgtccacggcaccggctggctcgtcgacccagaagtccgcaaggcctggctcgatggtcagctcgagtcggccagaggtcaggtctaaagcctcgagcggagggcgacgggacagagcatgcgattttaagtcttgcagtagagatggctctgtgcagcagtggcaggcagagggagcatgcggttgatcggggccacgcaagatgaggcctggcagggtgcgaaggcaggcggcgcttggcaggccctcctacttcagcagcttgctttgaagctcgacacgcgccccacgcaggccgtcggcgaaaaagagccgtgtgcgctcgccagccgaaccgggcgggcctgccgcaccagccgcagcttgagcgagctcggcttccgtccgggcgagcgtcggcacgacttgtgcaatcacgcggtgcgcgtaggggacgatcgccgggtcctgcgtccgagagggaggtgtcaagaaggtcagcttcagcaagcagcgggccgacggtgagcgacgcaggactgaccgtcgtgtcgagaaggcgcgaggcacgggcgatgacgacaactgctgacgcaaaatcggccgtgttggcaaaggcctgaaggtggagacgagtcgtcggcagtcaaatgcaaagaacatctccgctccgaggatcgaaacaacgtaccctcggcagcgactctgtgaacttgtgaacggtcgtcagcaggacggcctggctcagcgggccgcgaatttcaggcccagccggccggctgccgggtgcgacgtcggggaggacggcgtcgaggtttggcccgatccgccgcgtcagctgtgcgagcgccgcagggtcggctgagaggaaagcctcggtgaaggcgtcgccccagtcgacgaccggtgccggcgagtacctcgagccgccgggtgagaagggggtcgggcctccgggacccggtccgatcggctgcgggtagacaagcgacgccggggggaccatcatcgactggacgagcggcgaccgctgctgcgggttaccgaagggcgccgacaagaacagaggaggcgcttgacccgccggcggtggataaggctcttgctggtgttggtgctgcgcgtgctgcgaatgcaccggcggtgacgcgtaagtctcgaccggcttgacgggcgcgacgacgggcgacctctgccgcgggtgctgcgggatggcgacgacctgctgctggaggctgacgacggtgccctggagctcggccacctgcttgccgagcgcctggatctggctcgtcatctcggagagcaggtcgttggtctcgacgagcgcgccactctgttcacggacaatctctttgcggatgctatgcaagaaaacgagccaacgtcagcgagagaccggggtaagcaggaggggaccggggtaagcaggaggggggaacaggacgcacgcaatcatgtcctcgcggatctcttgcgtcagggcagcgcccatcgccgccgtcgcgccgtcgaacgacgggatgagcgtcttgcccgcgagatccttgaccgccttgtcgatcgagagatagacggtgcgcgagctgatagactcggcgacgctgcgggcgacttcttgctggatgacggaccgcacctcggcccgaacgagggtcgagagcgccgggagaacggccgagtggagctcggtcttgaccgcctcagtcacaagtgccgagtggttgttgccgagctcctgggcgagcacagcaaagatcttctcctgccggcgcaggtcggccgtctcgagccgctcgctctggagctgaagcgacgcggtgaagcgccggatcagattctcctcgaccagagcgagctccttgcggacggcccggccgagtgtgccctctgaaacagcagcagcggtctccttgactgccttcggggcagtgccgttggtctgactgcgaggcgtaggctcaggcgtgggctcgggtgcgataggagcaggcgtgggcgcaggcagcgcagcgacggcgacgggcgccgtttgcgcctcctcctgcttgacgatctcgggtctgctctcgggtgcggcgggcgtcgggacgactgtcgttggcgtcggctgtaacaggcggtcgaggacgtcggccgaaaaggtgagcatgtcgacgccgttcggcgagacgacaaaggcgtcggtgtcggtcggcttgacgacgaacgacgtgatcggttcgtcgagcgcaaactcgacgatgcggccaaagaagggccgcgagccggcagcggactcgcggtcgagccggagagcatacagcgaacagcgggccgtgttgctgagccagacgaggtcgcgccgccggtcaaactcgatcttgccaaaggcggcagtcgcatcgggggtttcgaagcggacctcgtcgagcagccccgagacattgcgcgcggtaaccttgaccagccgaaggaccgtgccgcgcttgctgccgaggaggagaaggtccgaatcgaggaactcgaccgacgacggcgcatcgtccgtcaggtgactgtgccagaaggtgtgggtctgtcccatctcggaacggtgtaggccgaccgatccgtcggcttcggcgatcgcaacctgcgtgccgttgctagagaccgggcggatggcaaagtcgacaatcgcacggccagcagtacgcgttgcgcagccccttcgctcaagggtctcgagactgataggccggtcgcatgtccagcctaagctgccaagcgtgaactcgacgagccagacggccgacgccgagcagacggcgatgttcgtcggcgacacccagcgaagacgagtgagacgccggtcctcctgatcggccggcccggtcgcaaagacgagagcgcactcgggttcgtcctcggtccacgacgtcgggccgcgccagatgacgagaccgccgtcggtcgtgatggccgcgacgagaccgccaagcgtcgcgaggtcagcgacctgcgcatcacgccggtaccattcggtcggcagcttgagcagagcccgcgcgcccgaggcctcgtcaatcagcctgacgcggcccttgttcatcgcgtaggcgatgaatgtcgagccgtcgaccgttcgaccgggcaggtagatgagatcggagcggatgatgctgatcggccgcttggcgagcgcggccggatcggcgacgagcgactcaaggttgggcttcgagatgtcaacgggcgcgttgcgctgccggtcagggacctcggcggcccgtccggcaaggccggccttctggagggtctttgcgcgccacttgcccgacggatagacatcgcccttcttgactcgaagactaccgctgcccgtcctcgtgtggccgagtgggctatcagcggcgatcggcgcgcttgcgttggaagagcgtgacctggcgggcgacgccggtggttgcggcgaagacaatcgcacggcgggggccacaggagccatcgacagcggcgtcggggtcggcggtgacggtgccgagggaaagagctttggggcgagcttgctgtcggccgccgcgccagcagcgggcagcggtgcgccgtggaagctcgtcgaccgcggcacccggctggctgcgaccgcagaggcaggcaacagcgccggtcccgagctcgtctttgccgtctccgacgagggctggaccgacttgggccgcttgccggctgagggaccgaaggccgcgtcaaaaggcgagacgaagctgaacatcgatggattcggctggggctgctggggctcgaccggctccggctcagccggtgcctggtcggcggacgactgcggctcgatccgtagggccatagcctctgacggcggcggcgagggcgaggtgtagccggtgtctgcgagcccgtagccgtttggcctcgtcgaccgctgctgctggaccgagaggagcgggttcatcgaggtcgccggcggtggcgagagagtctcgcgctgcgaaggcggcggcaccaaaggcagactggagagaggacaatgcggtcagcatgtcggtccacggcaagctcaggccggagagggacgacgcacccgcccatgagcatctccatcaggctcgtgccgccgaggcgaccgcccgggctgccggcttgcgagatgtctgaccgagcggctgaaggcgacggctcgccaccgtagctcctcgccggcgagagctcgctcggccgctgctgctgctgctggcttgatggccgctggttcaggaggtcgagcaagctcattggatggccgggcgaggctggggagctcgcttgtggcaatggcggcggcggcggcgagtggaccatcggggtcgatggaccgcccgcgagcatccggagcaggccattcgggtcgttcataccggctggcgtcgacggtccgggcgggctaccggcaccggcgaggccctggaggagcgacgcgaggtgagtcccgctggcgagaggaggagggcttgccatcgacgagcgttagaggcaaggagggctgcgtctcgcgtgacgttcctgcctttgactggattgcgggtgccagaagtggagcggcggaggagcgacgacaggcaggggagagacgagaagggcgggttgacaggatgggagctgagtgcgagggccaggacggtcgagctctgcctcgccttgccttcggcggccgccgccaggaaggagctccagtgagctcgaacctggcttgcctctgaccattgtctccatctcgccctcgctacgcatctcttgcctttccatcgctcgagctgatcaagtcaaaggcccttccttcgcggttgactttgccacaagagcggtgcggctgagccggcagaccgaacctcttgatgccgctgccgagctcgccccagcgcaggcgcatgctccctgtcgactgcctgcctcctcgcaaggggcccgggcttgatgcggcaggcttacgcaacgccatctcaattttctcttccttttgacggcgtgatgttctcctcccgtcgcccagcggacggtagccgcgcctcgccgttgatgctgctgaccctcctctggcggtttagagtttctgcaggcggtcgcgcacggcggcggagcggtgggccagaagtgcggctctcctcctcctttcgtcagcgtcaggaaggtagtcagtcacgcgcgaaggtcacaagaaacctgtctgaccagcgtcagcagaaggacaggggggcaccggcgactggtaaaaggtgtgcgtgtctgcgagcgcccaaaggcaaaggcgcccgcagcaggggggaagagggagccgggcgctctccagcagccacgtctcactcaaacaatctcgggagccacctcggctgataagctctgacccacgctgcctcacgcgagaggagaaaccagccgacaccagtctggagacgacgtcgagggcgccgactgcttacttgacgcccttgaaccatctcttgcccgtgacgtgtcatcgtagacgactgccctttctctcgagctgattcaggagcgctccgcatcctttgccctcggtggcgcacggtccctgccatccacgccgactactgactatcctgaggagctgaccagatcccgttcggcaacggttgtgtcgtgcgagacagggcaggcgttgatcgtcgcaatgactggctggtgacttgctcgagcaggcaagtacgctagcaggacgaggttgcacccgctcggaggcagagcggcaatgaacgacggctggcggcgtccgacgccggcgagaaaggcgttgcaagcagacgagcgcgaccggcaggtagggttcaagcgttggcccgactgggtaggcagcccaaagcaacgggcgccgggtcgaccgttcagacactgcttcaagccaagtaggagaaacagcggtaggccgtctcgcttcccggctgctgctgatcctctcggcggaaagggattgccggcagcacacgagcgccgttcgaagctcctcctcacccctcctctgccctgccacctgctgcattactgctcttcacgcctcgccgaactcctttgtagctcgcagcagcttcgcgtagattgtaaggcgactcttctccacggacaggacgacgagagtgttggagcttttgtcgaaaggcagactgagaagggtcaggaggggcagcgttcggctctcggatcgacgctaaggggctacttccttcgaaagaccgtcgcggggttccgtctctggagtccacgcgggtggggctgatgcaaccttagctcttgagacgtgttcactctgctctgccttatcccacgcttcggccgccgacccctggcccactcgcccggcctgcccgttgcggggcagggcgcacgcgacgcccaaccgagacccctcagtcaactcagttgcgctctcctccgcgcgcgcgagagaaagcttaaaccccgtgtgctgggcatctctttccaactcactcggtcctcgggcccggcgctctggctctgctatgccggcttggccgccgctcgctgctgctccatgccagagcggccgacccaaggttcagtggatcgtcgtccgtcgtcgctcactctccctctcgagctctcgcacgcacctcaacccctccgcgggtcgtctcacttgactgctgctcgtccacgacaacggtccttgccttcgcctctcttgctggctggctcgcaggccgagccgcactggctaaaaggtcggacgacctcacctttgttccggctctctcttccccctcatccgactcttcccttcctccttctaagcaaccctccggcttgcccaccaccacctctgcctgcctacctgtccaccgtcctcgtcgctcctcctccactcgcactctatctcatcacctccaaccacccagcgatgtcgacctacgacttcaccccgttcggctggtcggctcctacctcgacctccggcttccagaccgaggccagctcgagctcggccatcttcggcaacaacgactcctacttcgccgactttgcgtcgtcatcgtcgccctcggccggctcgtcctctggctcatcgtcctcggcgccggtgacgccgcccaagagcgcgtctgacgccatgctctcctccttcgagtcgggcccgccgtcgaccgccggtccctcgctcggctccggctgggtttcggtgacgcccttcctgcccgcctcagcctcggtcgccgagcggaccaacgactctggcttcttcctcacgctctcgtccgaggtcgacaagaagctgcggacggtccaggtgcgtgctctctctgacctccctctcttgacagcccgtgctgacagcctctccgtttcctttcccaggcctgcgacgcctgccggacccgcaaggcaaagtgcgacggcgccaaggactcttgcacacgctgcatccagcgcggcatctgctgtgcctacacgaccggcccgcgcatcaaggcggccaagcggccgagcctcgcctcgtcgaccgcctcgtcgtcgtcgtcggccgtcccgctcgcgtcgcacgtcaagctccagtcggtaacgacgccggccaaggctcgcaaggcctacaagctcgctcgccggtcgtcaaccgagtcggtcgccgagccctacattgtcgacggctctgcctacgccgatgagggcgagttctctggcgagctcgcctacggctggtcggcccaaggcctcgctgcccccttcgagctcgcttcgtacggccagcccgcctaccaggctccggtccagcacacccagtactatccgaccgccgccgccctggtctcgcgccggacgtcgcttccgcaccaggcctcatcctatgcgacgccttacgcccggcctcggacgtccagcctctacaactcgccctcggtcctcgcgcctgctcgcggcccctcgagcctcggccagccccgccgggcgtcgtccttccatccctcggtcgggtattcgacaccgatggtcgtcgaggactcgtttgccgcctgccactcgatgccggccgccatccgacaagtctcggctcccgccgctccctcggcagcttactcgcccgccgcctcctacgctcctccgccgacacaggagtcttcattcgacccgttcgaggtcgagtcgatgtgggacgagtcgcagcccctgtggggtgaggccgcctactaaggaccatctcgctttcctcccatctcatcctctcctcctctcgtcatcatcatctcattgtatcacacccctcacacatagtttcattgtatccggaccttctctagcatcacactttaaccaggacaatctcgcacgacccttttaatcactatgatctccatcagctcttgcttcgggccagacagcgcgcagaggggcatcgagacaaacagacaatcgagtgttgcggcggaaggagggggatgattaatttgcttagggacaaagacaagggaaacagcaaggaggcagcgagagcgtccagcacaggacccccggttcaaagcaagagcggtctgcagcgagcgactagacagaggcggcggaggcaaatggaggataaatggtgagaggacagggctaggtcgtcgacggatagaaggtggtatacgaggaggtctcgaccgtgtcgtcgactgagtcatcttgcgaccggtcgtcgccgtagggcgcatgggtatcggccgtcgccgacatgtaggcctcggagccagcgtcggtcggctgcggcgactggccgtacggcgccgcaccggacgagtacgtgccctggccggcgccgacggtgacgtggaagaatccgccgctcgccggcatcgccgctccgacggcgacaggcgagccatggatcgacgaccccggcatcgcgccgttcgaacgagatgtgtacgaggccgagctcgagtcgcccgtctggcctcgagagctctgatctgagctgaacgcctggagcggtgagtcgccgttgaaggcgaacggggtcgacatggcgctatcgcgcgacgcccgcttgccggacgagtagccgtcgacccacatcgatgacgagccctgcgccggcaactcttggaccgtctcgtccgagatgttgagccctcgaaggagcgtcggtggcaccggcgacatcccgaactggccttggatcggcggcaggtggacgtcgtcaggggcgtaaaaggccggcacgtagtgcggctccgactgctccgaccggtagctcgcgtccgactgctcgctctggtgtgagtagttgcgcggcccaggagccgggcgctgcctgttcgagaaggcggcctgcagggccggaggcggcgcgataggcggcagttgactgccgaccttgctctggccttcacactcaagccgagccgaccagatggcgcggacgtggtccgaccgctcgtccgacctcgcataggcccatcgcatctcgccgagggccgtcagacagcagttgctaaaagaggcaaggggaagccggtcagtgagggcgacacctcgaacgggagatcagagacgacccacatctcatctgacgtgccgccatcggcggccagaacgcaggccgtaaagtaggtgccgtctgcagggaaagagcacagtgtcagctcgactgctgcagcaggtcttgacgacgaccgcccaactcacctcgcacgaggccagagtcgtattggaagagcggcccgccgagattgcgccagatgatggtgatcattgactgcgacatggcgaggcacttggcctcggcgatcgcatgcaagcggccgatctcatagtgctcggccggctggccgttgtcggagccagcggaacgaagaatccgcgcgtaacggtcgtagagagcttcacggatgaccgattggcctggcgacggagcaacaggtcgggcagcaaggatgtcagccatggctgtcgaggtccatcgtcggccgcaaacgagctcgacgcacactcgaagagaaagaccatccacccgtcgcagaagcgctgcaggtcgtcgtgctggacaagtggattttcctgtgcctcggtccggaggcggtcaaagtcctgccagcagttgtcaatcgaggtccaagcgcgatgcaagtcggccgcatcgaccgccggcgctcgtctggcctgggcgctggtcaaggcactgtggacgagccgacaggcgacagcgagctcgatcggcgtcgacgcgtactgcgagagatgagagaagtgcgacggcgctcgcgcgaagggcaggctggcggccgagcgctggaaatcggcgagatcctcctcgtcgctggagcagtgaaagacgggaggagggcgagtcagcatcgctcgtgccatgaggcgagtagctcggacagagcaagcacgcacaggataagccgtctgcccttgaggccaatcttgacgctctcgtagacgaacgagtaccagtagaggcggacctgcgtaatcacctcgtgtgggtcgggcgatccgctctcggacgagggactcgcgccgagggcgccggttgcggtgagtgtcgcgacctggccgatagcacactcgtacatcacgagtcgctcggagaccgacgaggtgtctggatcggaagcaactcgcacgagaggagcagcgagttggttgaatgtcgatcgcaggacaatccggcagacgcaccttgggtgagaggcagcagcagaagcagcgcctggacgccatcccaactcggcttgcgcatcacgccgagacgatcgatgtcggccaggcagctctcgacgatccagctgcactcgcgccgccgctgcagacggatggccgtcgtcatcggctggacgtcttcattgccgtctgagtcaacgccaaaggacctcgcccaggcaaaaagcgttttggcgatgatagccccggtcggcccgaggttggatgagaccgccggcgacgtcgaccggaagcggcgctcaaagtcgtcggcgtgaagaagggggcctgcaagggagagccgagtcgagtaggtcaacgtggatttgtgtgccgatcggggaagccgagcagacgcacgctggatcatgagtcggtgatagaacgagctttgtaggaaggcctcggtcaggcaggtgtcgccaaagtcggaccgttcgccgtctgggcttcgatcggacgagctaccgaccgattcatcggcgctcaggacgctgctgacggtcgtccggcgtgatcctggcttggcccgggctaccgttatcgctgcaggatcgaggacgaccgtcggcacgccgctgccgaatgtcgactggaccatctgaatgcgcttgccctttcggagcatcttgggcttgccgttcgccgacagggccggtgcgactggctgcgtcggtgaggtcgtcaagctcagagttggtgacggcaagggagcagccttgctaagctccttggcggcgagcccgtcgctggcagagaagtcaagtaggctgaatgtcagtctcggatgcaaacccttcaaggccgccggaaacaagacgacgcacacgcagcggaggccgcgctccttgcagttggagcaggcgatgcgttggccgtcgagcccgatgagctcgcccgcgacgagttcgtagccgccgttgtccgagatggcctgcgagttggcgtgattcatgaggaccgacagatgctggggtaacacattggtccggtagacggccttgatgtcgtgcaagctagcgaagggcgagcctgtcgtcagtctcatggatgacgcgaaggcgcgactagggactgaagcacgtactcgcacttgacacgacgcatgcggcatgcgctggagtgagccgactgtcagcgtttcgagctctgcgatgcaaagggtcggccgaaggactcacccgcaagccgagtattgggcgcgcgggaccttgctgccatggccgtcggctaggccgtcttcgctcttgacgcggaggccgagcacaggccgggccgctcgatccttgcccttgcgcaccttgccaccggtcccggacgcgagctggggcgagggctgaggtggcaccgtcgacggagcgtgggcgtgaagcggaagcggcggcgatagcaaggccgacgatgcgctcggggccgaggtcgagtagctgagcgaggcgaagtaagagtgctcgccgttggaagaagtcggcggcgccaacggatgcgacgagtgcgctgacgatgtgtcgtagacggtccggccgacaggtcgactgctgcctcgggcataggctgcgtgttgacgagagagcagtgaggagcccgaggccgaggtcgaaggtgcgaggagattgcgagggtccattgtctgcgactcgcgcttcatcctccgccgggaagacgactttggctgcgagagcgagtcgtgcgggcgaagtttgagcgagccggatgcgagtcgagcgtgtctacgttcgagatttaaggcagccgagggaagggcgtgccggatcaacggtagggggtgcggccagcagaagacttgagaggttcagaaggaaggggcccaggtcgacgtggttgtgctcccgcgttcccccttgtttttcccttgacaggcggaggaggagagaaggcggggaccgactgctgcagcagagcaggctggcgggctgggagcgtctagggccggccacaaagctaggtcggggcggtgggtcgggcgaggaggtgaacggaaggagaagacgaggagcgacgacgactcgaggctagactgccggccgctcttccgaacgagcgagcgagagagcggcgtcaggagtcggtcgacctgccaggcgcctcctccctccccctccgcttccccggggcttttccttcgacccgacatggtttgtcgcgaagggcaggggcgagggggcgcgggccagtcgtgggcttgggccgcgctggcgatcgagcgggcccggcacgaccgccggatggctgctgagctgagctgagcctcggctccctcgacggccggcactctccgccacggggtcgtaaagcgtggaacattgcgaggcgtcggcacgtcgtgttcacgttgtgtggtccggatacggaagcggatttcgggacgaggagcggtcggccccaaggagggagctcgagccatccctcggcagagtgaggagcgcagacgagcgaagcaaggaccagcatcgagcgagccgagtacacagcctgctctcttgcaggtcgacgtcctcgggcacgagtcggacgagctcgttggattgagcgaaagggaagtcgaagtgaacgattaaaaaaaaaataagcggcgggttgcccgcggcgagggcgggcccgggccggcacacacaactgggcgttctcgcccttttcgaacgaataggacgcctctgcaattcgtgctgcacggcagcttccagctggtccgtcgcgctgttgacgaggtggccaacagcaggtcaaacttggtcaaaccggcttctctccttcctctgctaccatccctccttgcttagcgggctgtcgagaggggccaacatgtctgctagcctcgctcgctcggccgagaggcgcgtcaaatcgtgacgagagcggcaggtggtggcgcccgcgcctcggcgttcgcccgtcaaaaggtggcgagtgcgaccgacgtctcacgccgacgtagcgcgagttgaccggctgctgacagacgacagcttgcgcgcccaaagttcgtctcgagcggagcgctcgcctcctcgagcgcgtcatggacggcagccgaccatcacacgtcgagatgacgtcgaagacgtctgcaccgagaccaagcgtggaaggtgcaaggtgaagaagacagccggccagcggcgcatgtgattggcacgacagagaaggacgatacagcgaccgaccgctttgtcgtcggggtgtggctcgacgactgactgcttgccagctctcaacgctgaggagcgataagcgtcgccctagtcggcgcgggccttgcccttgcccttgccagcccagggcgagtcattgaggaaccagtctgacgggcgagcggagagcttagggtcagtagacgtcgctcggggacgggcgcagcgagagagcgccagagtgactcacagccgccgttgagataggtggcgaatgtcagccaggcgcctggacaagggagaggtgaaatgatcagtcaggccggaggaagcgcagcgggcgtcagtagcaggacgcacagtaggggaggaagagccgagcgggcgtgatccagctccagcggccggtcagcggcgcgggcagctgcgaggcttggtactgtcgcggagggaggagatatcggtctcagtgcgcgcctagcagggacagagcctcgagtgaggaggaggcctcaccgtcatggcaaagacggtgccggtcatggcaaggatgtcgacgagcgcgagtccggtctgcagcaaagtcagagcggcgtgcaagaagatgagtcatctggcggcgcacagctcgatccggcgcgacgtaccaggcgccacgagaagaaggtcgggctggaaagaggcggcagaggagtcagccctctctgaggggggggatctgcggcgcagttcctggtctgaccgacgcacctccagagcatgttgagcccaagctggacccagtagagcgtctggacgacgctggcaatctgcttcgtctcggcgctcgcaaagggctggcgggtagcctcgttgacgaggtatgaagcgaggcccatctgcgctcgtcaggcgcgtcgtcagcgtcttcgcgtcctctgcgcagggtggaagagcgcaagactcaccgtcaaataaaggtatggccagactatcggaaacacctggcgaggcggccggtacgctggcggccgcatgcccgtgtaccacgacgaccggacggcatccttggtcgcgataccggagagcgagccgaggacgaatggcaggccgactggcgggcggccgcagtcaggcgagagcggcaggtcagccccgagatctcggcattgtcgaccagcgcggcgagcattccacacgcacccgagatgaccgggtggtaaggaatctcgatgaatgggttaagcatgctggctgttgagatggttgcgagggcaaggaggtcggccgacgacctcgctgacaccttcgaacctctttgcctcggccggccgcgccgagcgacccgaagccaccgctgccgccacctctccgacgacgacttccccccagcctgccccttcttttgcttcgctcctcttccgtttcctctggccgtcatgtcggccttccgctcgctcgcctcgtcccggctcttcgccaccgcatcgtgcgttcctcgctggcgatctagcccggcctgcgccgccgccgccgcacttgggctgaccgaccccctccctgcgtctgccgttactgctgcaggccgctctcgacaaaccaccacaaggtggttgtcgtcggtgccggctcggccggtgtcagcgtcgccaacatgctctacaaccgctttgccgacgagggccgcaagctgaccgacggcgacatcgctctcgtcgacgtgcgttccccgcttttgctctccgcgcacggaaacggcgcccaagtcgccggcccgacttcttgtcagcgaagctcatgctgacctgcctttcaaatcgatgctcatcagggcgccgactaccacaactaccagcccgggtggacactcgtcggcgccggtctcgcccagaaggaggacctccgccggccgctgccgtcgctgatcccgtcgcacctcgccctccacccgtcgcacgcggccaccttttcgccggcggccaactcgctcacgctcgagtcgggctccaagctcacttacgactacctgattgtctgcccgggcctccagaccaactttggcgccatcaagggcctggccgaggccctcgccgagggcaccaagtcgtctggcgtcggctcgatctacagctacaagaactgcgaccaggtctgggacggtattgaggactttgccgggcgcaaggcgatctttacccagcccaagggtattatcaagtgcgcgggcgcaccgcagaaggtcatgtggatggcgcgcagccagtgggcccgcgagggcatcgtcgacaagattggcgtcgagtttgtgtcgggcatggtgcgttctttccgccgaagatccgacgctggtgcggtgccctgactcaagccccgactgtgcgcccatctccccagccggccatgttcgccgtccccaagtatgccaaggcgctctctgcccttgccgacgagcggaacgtcactaagacactctcgcacgacctcgtcgagattgactcgtcgaatcggatcgccaccttcaagaccgacgccggcgagctcgtcaccaaggagtttgacttcctccacgctgtcccgccccagggcccgctcgcgagtatcaaggagtcgccgctcgccgacgccgccggctgggtctcggtcagccagcagtcgctccagcacaccaagtttgccaacgtcttcgcgctcggtgacgcctcgtcgctcgcgacctccaagaccgctgccgccgtcaccgcccagacgcccgtcgtcgtcgagaacctcaaggctgcgatggacggccaggtcggcaaggccgtttacgacggctacagtgcgtccgcctgactcctcgtgctcgccaagcgcccgccgccgagtttccccctcttgctgatgatcgtccccttttctccttcgacccccagcgtcctgcccactcctcacc
